United States Patent Application Publication US 2019/0169691 A1 - sequence listing, part 2

SEQ ID NO: 2010 - DNA, 1900 bp, Homo sapiens
  misc_feature (1)..(1900): DMR14:20735201
cacttttgtcttcatttacctaatttactcctacatgtttgtcaagattcagctcgtaatgcatctgatctttactaaccaagatttttcctgatattcactctaaacctacccaaggtggatgatcttcctttccctaaataaatcgtattatgccaaaatgtgtgacattctacatatgatgtgtgtaaagtaagtatcatgtaattggtatgggtgtgtgagatctaggatatgtttgcctgtgacttatgctgtgcaaggtcacattttatgtgactgtgtctgtgcatgggatatgtttgtgtatatcatgaggatgtaaatgattataggctaagctggagacaaactgtgatgtagacactgattgtgttgacaatttgatataatcaaaaaggtcataatccagttttaatgattttattaaagtgaaaagatgggaatggccactctgtgacacacaaactccagagaaagttaagtttttgctaatgtaggaaaaagacaaagaaattcaaaaggattacaatattttctatgccaggctggttcaagagttacaacaaattaattagttacagatttgtgcccaacctcatgacttgttttcatttattcatagctgtgcttcatttctgttccaattttaaaagagtgtatttaacattccatctcaagacgatgtgatagcaatgaagtctttacatcaaaaacagaagaggggagttcatccataatgaagatcagcagtggagtggaatgagtcttccctggcccacttcagtcattttacatttcacacaacaatgcaggtaagaaagtgtcttaatctctaatcagagaaaccaaggtacacctgccttggttacagctgcctagtatgtgactcaggccccatcatcacttttttttttttttttctttgagacagagtctcactctgtcacccaggctggagtgcagtggccagatcttggctcactgcatcctccacctccaggtttctagcgattatcctgccacagcttcctgagtagctggaattacaggagcatgtcaccatgcccagctaatttttgtatttttagtgaagactgggtttcaccatgttggccaggctggtctcagactcccgacctcgggtgattttcccacctcggcctcccaaagtgctgggattacaggcatgagccaccacgctccgcccatcatcacattttaaggttcaaaataatatagagttccaacagcttatattttgaatgaattactttcacggtggtaacatgcttagttccactcagtttcttgggtaaaggcagagctgactgggtataaaacatgtggcatgattcctggcttatggtagttgctcagtaaaaattctttcctttctcatattactctttggttttctactttaattttgactttgataaacaaacataacaagtgcccatcaaccatttctgtccctgactctggagatggggatttcttttattttttatttatttatttttttaagacagagtctcactctgtcacccaggctggagtgcagtggcacgatttcagctcactgtaatctcctcctgctgggttcaagtgattctcctgcttcagcctctctagtagctgggattataggcgtgagccaccatgcctggctaattttttgtattttttagtagagacagggttttgccatgttgccgaggctgatctcaaactcctgagctcagggaatctgcttgccttggactctcaaagtgctaggattataggcgtgagccaccaggcctggcctagagatgcagacttctttcttttcttttcttttctttttccttttttttttttttttgagacagagtttagcctttgttgcccaggc

SEQ ID NO: 2011 - DNA, 1300 bp, Homo sapiens
  misc_feature (1)..(1300): DMR14:24059101
ttcccctcctactctgagccccgcctccctgcaggaccctggaggagatcctccacaagctggtgcagctgatccaggaagaggactgtgtgagtgcctgggcctgggaggggacctgcagtcggaggaggctgtggggactgggtccaaccgccccttgcccacacagtccctgcagtcactgtcggtggcagactcccggctgaagcttcgcaccagcatcctcatcaatgccctgggcagcaacacctgcctggccaaggtggatctgagcggcaatggcatggaggacatcggggccaagatgctgtctaaggccctgcagataaactcctccctcaggtggggcccacaccgggaccccctgacctggagccccagcccctccccatatgtacataatctccctgctttccttgatgctctggaccccagcttccagaagacccccagccccagaaccatctctgagtcagccttattgccccaagaggtttgtgtccctggcccctagtagggacccaggaggagaggtgccaaactggtgcttaccctccccccagaactatcctatgggatcggaacaatacatctgccctgggcttcctggacatcgcaagggccctggagaggtgagtagaccatggtcctgccctgatccaagtccccagcctccctgtgcctggatcaggcctgaactactcttgccccaccctagcccctttgacctatttgcacagaaattttaggaagggccatggaagacagaaatgatgagcaagggggctggagggctgctcaccaacagaggaggcaggggcctcccatcctcacctgttcccacccagctgtgcccctgtgtcccacagcaaccacacgctgcgcttcatgtccttccccgtgagcgacatctcccaagcctatcgcagcgcgcctgagcgcaccgaggacgtctggcagaaggtgcagggtgctgtcctaagcagggtggcacagcaaggggcagggggcagcccccatccccaggccctgacccaccaaccccatcatctccagatccaatggtgcttagtgaggaacaaccactcccagacgtgcccccaggagcaggccttcaggttgcagcagggcctggtgaccagcagcgccgagcaagtaaacgtttccctctgggacacggggcatacccggggcatgcagggcacagtgtgatgtgatggaaaattgagtgggggagcatgaagaggcactgcatggtgcctatcactggactgagcatgtggggaagcaaaaagagagg

SEQ ID NO: 2012 - DNA, 200 bp, Homo sapiens
  misc_feature (1)..(200): DMR14:24109601
ggcaggagaatagcatgaacccgggaggcggagcttgcagtgagccgagatcggtccactgcactccagcctgggtgacagagcaagactccatctcaaaaaaaaaaaaaaaaaatcttttatacgcaaaaaaattaatcaatgaatccagtgattaatcttatattctttcccatgtgatgtgaaggactcaattttgt

SEQ ID NO: 2013 - DNA, 1600 bp, Homo sapiens
  misc_feature (1)..(1600): DMR14:24763501
agattttgggctgagacgatggggttttctaaatatacaatcatgtcatctgccaacagggacaatttgactccctcttttcctaattgaataccctttatttccttctcctgcccgattgccctggccagaacttccaacactatgttgaataggagtggtgagagagggcatccctgtcttgtgccagttttcaaagggaatgcttccagtttttgcccattcagtatgatattggctgtgggtttttcatagatagctcttattattttgagatacatcccatcaatacctaatttattgagagtttttagcatgaagggttgttgaattttgtcaaaggccttttctgcatctgttgagataatcatgtggtttttgtctttggttctgtttatatgctggattacatttattgatttccgtatattgaatcagccttgcatcccaggaatgaagcccacttgatcatggtggatacgctttttgatgtgctgctggatttggtttgccagtattttattgaggatttttgcattgatgttcatcaaggatattggtctaaaattctcttttttgttatgtctctgccaggctttggtatcaggatgatgctggcctcattaaatgagttagggaggattccttctttttttattgattggaatagtttcagaaggaatggtagcagctcctctttgtacctctggtagaattcggctgtgaatccatctggtcctggactttttttggttggtaagctattgattattgcctcaatatcagagcctgtgattggtctattcagggattcaacttcttcctggtgtagtcttgggaggatgtatgtgtcaaggaatttatccatttcttctacattttctggtttatttggtagaggtgtttatagtattctctgatggtagtttgtatttctgtgggatttgtggtgatatcccctttatcattttttattgcatctatttggttcttctctcttttcttctttattagtcttgctagcggtctatgaattctgttgatcttttcaaaaaaccagctcctggatacacttttacactgttggtgggactgcaaactagttcaaccattgtggaagtcagtgtggcaattcctcagggatctagaactagaaataccatttgacccagccatcccattactgggtatatacccaaaggattataaatcatgctgctataaagacacatgcatacgtatgtttatagtggcactattcataatagcaaagacttggaaccaacctaaatgtccatcaatgatagactggattaagaaaatgtggcacatatacaccacggaatactatgcagccataaaaaatgatgagttcatgtcctttgtagagacatggatgaaactggaaaccatcattctcagcaaactatcgcaaggacaaaaaaccaaacgccacatgttctcactcataggtgggaattgaacaatgagaacacatggacacaggaaggggagcatcacacactggggactgttgtggggtggggggaggggggagggatagcattaggagatattcctaatgctaaatgacgagtta

SEQ ID NO: 2014 - DNA, 200 bp, Homo sapiens
  misc_feature (1)..(200): DMR14:26523601
taatgtaaaaacagtcataaacaatcagtatggttgtatactaatacatttttatttatgggcagagaaatttgaattgcatataattttcacattccttgatatatcattcttttttttttcttttttttccctatccacttgaagattttttttttttttttttttgagacggactctcgctctgtcgcccaggctgg

SEQ ID NO: 2015 - DNA, 2100 bp, Homo sapiens
  misc_feature (1)..(2100): DMR14:26674701
gctgttttggttactgtagccttgtagtatagtttgaagtcaggtagtgtgatgcctccagctttgttcttttggcttaggattgacttggcgatgtgggctcttttttggttccatatgaactttaaagtagttttttccaattctgtgaagaaaggcattggtagcttgatggggatggcattgaatctgtaaattaccttgggcagtatggccactttcacgatattgattcttcctacccatgagcatggaatgttcttccatttgtttgtatcctcttttacttccttgagcagtggtttgtagttctccttgaagcggtccttcacatcccctgtaagttggattcctaagtattttattctctttgaagcaattgtgaatgggagttcactcatgatttggctctctgtttgtctgttgttggtgtataagaatgcttgtgatttttgtacgttgattttgtatcctgagactttgctgaagttgcttatcagcttaaggagattttgggctgagacaatggggttttctagatatacaatcatgtcgtctgcaaacagggacaatttgacttcctcttttcctaattcaataccctttatttctttctcctgcctaattgccctggccagaaattccaacactatgttgaataggagtggtgagagagggcatccctgtcttgtgccagttttcaaagggaatgtttccagtttttgcccattcagtatgatattggctgtgggtttgtcatagatagctcttattactttgaaatacgtcccatcaatacctaatttattgagagtttttagcatgaagcgttgttgaattttgtcaaaggctttttctgcatctattgagataatcatgtggtttttgtctttggctctgtttatatgctggattacatttattgatttgcatatattgaaccagccttgcatcccagggatgaagcccacttgatcatggtggataagctttttgatgtgctgctggattcgttttgccagtattttattgaggatttctgcatcaatgttcatcaaggatattggtctaaaattctcttgtttggctgtgtctctccccggctttggtatcagaatgatgctggcctcataaaatgagttagggaggattccctctttttctattgattggaatagtttcagaaggaatggtaccagttcctccttgtacctctggtagaattcggctgtgaatccatctggtcctggactctttttggttggtaaactattgattattgccacaatttcagctcctgttattggtctattcagagattcaacttcttcctggtttagtcttgggagagtgtatgtgtcgaggaatttatccatttcttctagattttctagtttatttgcgtagaggtgtttgtagtattctctgatggtagtttgtatttctgtgggatcagtggtgatatcccctttatcactttttattgtgtctatctgattcttctctctttttttctttattagtcttgctagcggtctatcaattttgttgatcctttcaaaaaaccagctcctggattcattgattttttgaagggttttttgtgtctctatttccttcagttctgctctgattttagttatttcttgccttctgccagattttgaatgtgtttgctcttgcttttctagttcctttaattgtgatgttagggtgtcaattttggatctttcctgctttctcttgtgggcatttagtgctataaatttccctctacacactgctttgattgtgtcccagagattctggtatgttgtgtctttgttctcgttggtttcaaagaacatctttatttctgccttcatttcgttttgtacccagtagtcattcaggagcaggttgttcagtttccatgtagttgagcggttttgagtgagattcttaatcctgagttctagtttgattgcactgtggtctgagagatagtttgttataatttctgttcttttgcatttgctgaggagagctttacttccaagtatgtggtcaattttcgaataggtgtggtgtggtgctgaaaaaaatgtatattctgttgat

SEQ ID NO: 2016 - DNA, 200 bp, Homo sapiens
  misc_feature (1)..(200): DMR14:28067901
aatgatgacagcaataaaatgagagcaatacacaaatgactatatacctacactctgagacatttccctaaacctctttaatataggcccatgaagataaaggtgtctccaagtttttttgtagattttttctttctttctttctttctttctttctttctttctttctttctttctttctttctttctttctttctctt

SEQ ID NO: 2017 - DNA, 2400 bp, Homo sapiens
  misc_feature (1)..(2400): DMR14:28090201
aggaacccacatgcactggttttgggtcttattactaaaaccctcatgcaatgtcttatcaacaggtgatatcaacaactatatctaactcttgctatcacttacctatgagtatgctcctcgttcaatttcacttttttccacattatttctctctcaattcatgattatttcagcacacaaaatgcttacttattaagtaactgttatctctcagtgattttgtccttcatctcacagccgtggtcctaccctagaattgtcatttaccggcatatccataatcttaaaatcatgaatccattccttagaccatcacctcctatactggcagctcactccctctcttactccatcccaatcactgaatctacgcacataaccaatgcattgattcgatcacctttcacagttccctcaccctgttaatttttgctctatccttttttcctatcttaaaatccaaggtcaatgcaaataatctttacacttctgttgttctatctcacttaccttaaaagagcccaaccctatttaaattcaattccatctaccagttttctgcacgcattcagttaaatggagctggagaaagcacacagccacactgactggccttgagtcatatttatgagcacaaacctcacgtgagcttcctatgacacctgactgtcattcatactgtactttcctcatgtactaatgccctaaaatactttccacacagatgacaatcccacaccttctggtctgtcctcaaacctctgacacttcactgtccatcctgactctcagcagaaaatagttctctatttcatgaaggagaattaggaaagcaatcaaaagagaacttttacagaatctacctcttagctacaagcatttgtacacatagatgtctgtttccataaatgaagtatttatgcttttatctaaagttatcttctttcatgtattatattctcactgacttaaggacaacacttgaacaatgttttcctttcttaacatgctcatcaaactttccttgtctaccggattcatcccattagtatataggcatgctattaattatcctatatgaaatacattagacaacaatgacaacaacaagaacaacaaatttcctactcatttttctctttgcattaaagttcttcaaaaaagtagctggaactaatatacaaattccttatcttgtattttttcttaaactcactttaatcgggcatttagttttaccattccattggaacttctctttaaaatatcaccaatggcctccactttgctaactcccatgacaaattttctgtcctcactatgttttaccaatcgaaagcattgtacataattgatctctaagatactatattgtgtggatttttttttctgtatttcattactcacttatttctagtctcctttgctggatcttcatctccttcatctgttaatggtgtaattactcagatctcaatcctttctcttgaactccagactcatgtatctgactgctactaaacactgtcacctggctgtgtaataaaaacctcaagtttaacatatcgtaaaggaataaccaatcttctctcaaaatgtactccaccattttcctgttcatcacagttgctgacaacatcggacatcattctgtttcaacatacttattatctttcatgacttttctcttcatattccatatcacatctgttagaaaccttgttgaatgttgtttcaaaatatatttagcattcaaccatttaccacagggactaccacaagttgtaagggaagtggatattcagttgaggacattgactattgagaaaaatcagatttcatttggctactggtaatgtttagttactggtaatgtttagtattaacccaccattgaatgcacagagaagctgatgaaaagcaggtgccacttgaccaattgtaacctcaagttgtcaggtcctgcctagtactccttaacacatggcacaggagcaggaattctaagggaagagaagccacacattattaagggcttttggtttgtttgtttaaattttttttaaatagagatggggttttcctatgtcgcccaggttggttttgaactcctgggctcaagcgatcctcccatctcagcctcccaacgtgctgggattacaggcatgagtcaccatgccctgcctaacagctttttaatagtactctgttactgaattcaccagtgacgtatggctcaatgaatatcctgagctttgatcaattagactagtaattcctttctcttagtgatttgctaagaaggaaatcaaactatgtggaaattcttgatatagagaagtataaccctttcctattatacatttcccttaaaataaaaaaattgaacacatttat

SEQ ID NO: 2018 - DNA, 200 bp, Homo sapiens
  misc_feature (1)..(200): DMR14:28697501
ttgttgttatagctatattttacgaagactaaccataatgcagatactctatatccatgctttattcccttaatatagacaatattatccacattttacagataagagaacagactcagagagataaaaataacttgcccaaatttacacaattagtgagtaataatcaaatttcaaacacagagccatccctctccaaa

SEQ ID NO: 2019 - DNA, 300 bp, Homo sapiens
  misc_feature (1)..(300): DMR14:29649501
gatttttttttggctcgagctgcgagagtttgtaataagctgttaaacagggctgtatttagctatgagttaataaaaggaaatttggtttgaatgtctagactgttttttgactttggttattaccttaaatacatggctaattgttttttgtttttatttatagcgcctttggctggcccttcaacattaaaagagggttattttaattcatacagggttttcagcatttgaggggttaacttgactttttgatttcccataaagccttttttaaagttttttaatatacattccaat

SEQ ID NO: 2020 - DNA, 400 bp, Homo sapiens
  misc_feature (1)..(400): DMR14:32271701
ggtattgatgaatagatgtagtttattaaatttttttctctatttcctaaactttctataaagaacttgtagtatctttataataggaaaaaaatgtgattttaatgaacactccatatactttcaaagtagactgaattcaaaatatttacacttactcattttcgtcttcgttgtcaaaagaaaggaggctactatttttaatttgtttttgtgagttctttttgaccgagtcctgatttacttcatcttcatttggcttcttcttttttgagcttgctgttaaacctgaatatttttcatctgagggatgcttgactggttttcgatatatgactcttccatcggctggagttggttcttcatctgctttggcagcctttatttctgctttaatttt

SEQ ID NO: 2021 - DNA, 1400 bp, Homo sapiens
  misc_feature (1)..(1400): DMR14:32968101
ggggagaggttggtcaggggtgcagagtgagagttaggaggaataagttctggtgttctgttgcacagtaggatgactacagtcaataataatgtattttgttcttcaaaatagctagaagagaggattttggatgttctcaccacaaagaaataacaagtgtttgaggtcatggatatgctaattaccctgactttatcattaactaatgtgtgtatatattggaaatcacactataccttataaatatctattattatgtgtcaattaaaaataaaacattaaaaaacttcctaatgtacctgtcatataatgtaaatgtatataaaatgttttgatttgaactattagtattaaaattctgaaggtgatataggttggtgtcttatgtcgaaatttaactatatcaatgaattcatcagttttgtacttggaatataattatgaattacttgttttctaaatccagtaataaagtttaataatagtacatttccacactttaaatcatattactttgcataactaatatgcttgtgcaacaacatttattatctaacacaatctctgaggggcaggaatcttggagtgcttgcctgggtggttctggttcaaagtctgtcatgaggttggagtcaaacgctggggccagggaagccactactttctttctttttttttttttaaacttattttgagctctggggtacctgtgcagggtgtgcaggtttgttacataggtaaatgtgcgccatggtggtttgctgcacagatcaacccatcacctaggtattaagcccagcatccactagctattcttcctgatgctctccctcttcgttgacaggcctcagtgtgtgttgtaccctccatgtgtccatgtgttctcagtgttcagcttccacttaaaagtgagaacatgcagtgtttgtttttttgttcctgcgttagtttgctgaggataacaaaagccactgctttctaaaatggctcaacacatgtggttgtggacaggccttagttccttgtggctgtcctggtagtctcagtccctcacctcctaggccacaccagaggctgcctgagtgtcctcagaatggcagtttactcacatcagagtacagtggtgagagagagaaaacccaaaccagaagctgtagtctcttagaacctaaccttaaaaatgtcagaccacattctgttggacttagaaaccaaccctggtgcggtgtgggtggggagtggggagtacatgagggtgccaagtactaggaggtgtggattattgcaaactgtcctagggactgattgtcacaagaagtatttcattaggaaaaaatgtactaataatatgccaaagttttcatgaggaaatactgcccatattgtgacataaatat

SEQ ID NO: 2022 - DNA, 4300 bp, Homo sapiens
  misc_feature (1)..(4300): DMR14:33754201
atattagagggcttttttccctgatattctttaaaactgagcactaaggaaataggtggggtgtgagggatggaataaagtgtgattggaatccggggtatcaaaagagacacagcagagtaagagcctttggccaagaggagggaggagaggaatatggaaatggatgacattcaagacacatttcacctactagggaggccaaggaagtcctcattcccttcttccccagctccctctcctctctgacctcatgttcgtggaatgcttaggagcaggggaagaatagtggctggagtcagcctcagagtgctggctctatggcggtagcatggtcagagggagaccatggcttcaatggaatgtgcaggcaatattttatgacagtccgggaatctgcatcctcatccccatcccactgaatttccagaaagacagaggtacaaacaggtaatccatcttagagaacagcacagcatctttactgtccttagtccccaagaacaaataccacaaaatctttcaagattctctctctcttctccctttccctcttaaaaatcatagaatcgtagagctgaaaagcctgtagacatggtgtttgactattgtgaggtacacctgaaagaataaaccatctggggcctttctgaagcatctacatttctcgctggactgtctgaagttatttggggtaaatgccatgacgtgtctcatagacgagaccatggacacagcaggacaaatctttagatagggacagtgagagttagccaaatggagacacatattgttgttttgggtaactcagtaggatgcagagccctggccttaggatcaacagatgtaggttttagtcctcgttttgccacttgatatatatttgactttggggaactcatttagcttgcctaagtctgttgaaagaggataatagtacctctcctgaaacatcgtagagttattatgaggttaatgtaagataatatgagtgaaaatattctgtaaactctaagtgactgtgaatacccaatattatctttattggattataactgtaaaatgtagggttttagcatttcagaatatattggcttagcttatgtttatcacaagtaattgacctcctcattttatttctattattggtacatttatttttgtgaagaaaagccacttttaacagaagccttcagattacccattttatttccaaagagggcaaaggcagaaggtatgttcataaaataaaagtaggaaaatagctgaaagttactaccatgacgccatccctgccgtggggtctgtgaattgcctcgggggaaaggattatataggagtggctatgaatcatggctgatgtgattaggctgcactctagaccgggtgggcgtgtgggcctttcaggactccttgtcattgttgctcacttaggttaatgttaagattagctgtctggtgttatttaataatattactgtcttaggccattctatgttgctatgaaagaataccagaggctgggtattttatgagggaaagaggcttatttggctcacggttttgcaggctatctaggaagcatgacacctgtatctgttcaacttctggtgagacatcaggctgcttccactcgtggcagaagggaaagggaagctggcaggtgcggtgatgccatggaaagagaggaagcaagcaagacagtgggaggtgccaggtctttaacaaccagctctcctgggatctaacagagtgagaactcactcacccctgagggagaccattcatctattcatgagggttctgcccccatgacccaaacacctcccactaggtcccacctccaacattgaggatctaatttcaacatgaagtttggtgagggcaaatacccaaaccatagcaattatccaactttgagtttgatttcttttattagtgattgaaagctttatgtatccctctttgcattggaataaagtaatcatttatcagagtcagtaatgagtaatacagagaccataagtttcttgagggagaaagggtaagagggcccagatgagccaaacccacctactacatagtgaatgccctggacaatttctggaatcccagttgggtggattcttgcagtacccagttgtattcacgaagtaactaacccccaagaagaatcttactaatatgttttctaaagggaatcttatattgaaaggtttttgaagtaaaagggagaaccagacagattgagactgctcagatggatcaaaatagcaattgggagtggcaagagatgcaaggcggtctgtgaaagagagcactgagcttggaggaatgtcagaattatattttagctgtgtaatcataaccaaacacttcatctctcttagcctccagctccttatttacagaaaggagatactaatatgtgctctacctaccttagaggctattgtaaggattaaaaagaaagaaaggaagttgagaactttgtgagctttcatgcagtagatagatgtagcatctaagcagtcagtcatcctgtagtctggtcctacgaggtacacagagaaataaaggatgcattctgtgccatctgaaggaaaacagagagtcagagacaaaggcagagacagcaagagagcaatccctggtagtacatacctaggtgctgattgggtagccgagacaaaagtaggaattcaaagggaggaggacagcactgggctaaagtatccaagaagaggaaaagggatttgatatcacccttgaagaatgaatattatttccactgatggtggggcatggggaaggaattcttggtctgaaaggtgatgtgagaaaagatatggagaagataaacacaaggcagattcaggagatgctggacaaagcatctggagtccagggagggaagtcatggaagataagccaagttgtcttggcttgggactgaagcttgagactgaatggacacaagcttttcatgatgagctaagtggtctgaattttattccagaatcaatcaaggctcttgagtggtgatagtgacaatgctgcaacttaatatctacatagtgctacaccattttcaaggcgtttttaaatgcaccacctcattccattttctcagcaattgtgtaagacagggatgaagaggatggtcactgctgttcaacatatggggaactgaggctcatagaggtcctgctgctgctccaaagttatacaggcaaatgaggaagaccctatagctcctggtctacttccttaaagatactctaggaagatgaatctgacagtaaaatgcaggatggaccagagtggggaagaatacgatgggggaaaaaatgagagagaccggttaggcagctgcccacccaattgtccagatgtgagatttcaagaatttgtattacagtgatggcacttggaatggatataccaagaagtaagaaaacattcctaggtcttaatgactgactggatctggaaaatgagagaaagaggatcaaggatgagccaagagaagtgatgcactccccttttctgcctttgaatgctgatgaaatggaagcattcgcagaaataaagagtggtccaaggttgaagcctgagtaaccagttggacactagtcctactgacattcattctttaccctcatgtggagaggccattccttttattcaccttttcattacagccctgatcacacacttgtcaggtcaacacagatggactctgagctccttggtaattatgcctcagtgcctgcacagagcactgccttataaaggttaattaaacattgaatgaatgaatgaacgaatgaatgttgtcacactcctaaatctcaggtgcagtcatataatcctttcttcagaattcttctgtggttccccctttgtctgtacatgaagtcacaactcctttgtacagcattcatagcattccacaatccagcctgcttcacctcctccagcacctccccacctactccactttgtcctctgtctgcactcctctccatttctgaacacaaaaagcagttttgtgtctctgtgcttttgcttataatagttctccaacctaataccagtcaaatcctactcacccatagaaatttaactcaaatgctgcctcctccctgaaaggctcgccctagtgccttgtcaggatggctctcctctttgctacttctgcacggggcatccctctgcaggtctcattcagggcttggccaatgtgtgcaactcctggacaagctggccccatagggcgtagcagagcgttgactcc

SEQ ID NO: 2023 - DNA, 100 bp, Homo sapiens
  misc_feature (1)..(100): DMR14:35205601
catgacccaccatacccagtgatatctgctctattaacagagaaaagcagtttcagaagtgaaagaaaagttattagtggtttttgtttgttttaattag

SEQ ID NO: 2024 - DNA, 300 bp, Homo sapiens
  misc_feature (1)..(300): DMR14:38737701
tgatcagaaggcgggtgtcttcagggtgctcttccagagcaagctgccccccagccttggccaatgaacagaacagtcaggacagcagcaactaaaaatcattcccagtcacccggaaattgctgggtctgaaggaagctgacagctatcaaagccgacgtggctggctgactgctgctcaccaaggcaaagaacggcttccagcagagggctgggggaacagggctgagtcctgacagcacagacatgacctctacaagtcaccctctttgctgcactgttgagacttagaaactaggg

SEQ ID NO: 2025 - DNA, 1100 bp, Homo sapiens
  misc_feature (1)..(1100): DMR14:39601001
cctaggaatataacttacaagggatatgaaggacctcttcaaggagaactacaaaccactgctcaaggaaataagagaggacacaaacaaatggaaaaacattccatgcttacagatacaaagaatcaatatcatgaaaatagccatactccccaaagtaatttatagattcaatgctatcctgctatccccatcaaactaccattgagtttcttcatagaattagaaaaaactactttaaatttcatatggaaccaaaaaagagcctgcatagtgaagacagtccttagcaaaagaagaaagctggaagcatcacgctacctgacttcaaactatactacaagtaaccaaaacagcatggtactggtaccaaaacagacatatagaccaatggaacagaacaggggcctcagaaataacaccacacatctacaaccatctgatctttgacaaacctgacaaaaacaagcaatggggaaaggattcctatttaataaattgtgttgggaaaactggctagccgtatgcagaaagcacaaactggatcccttccttacaccttataaaaaattaactcaagatagattaaagacttaaatgtaagacccaaaaccataagaaccctagaagaaaacctaggtaataccattcaggacataggcatgggcaaagacttcatgattaaaacaccaaaagcaatggcaacaaaagccaaaattgacaaatgggatctaattaaactaaagagcttctgcacagcaaaagaaactgttatcagagtgtctatcctttgagagccaaagtgtctatcctttgagagtttgtaaccaagtgcaatgatgggagatattaatactatttataatgttaggtggaatattctattaatgccttaagaaaggattaaagcagagttgtaaaagtttggagagagatggtttttaatttgcaaggatcggggaaatgttcatgaaaaaggggacatttgacctagaacttggaaaaatgagtatgttttgaccgatagatttcaagggaaagaactccaggcagaggaaagattttggcaatagtcatggcggcagaaatgtcaaggatat

SEQ ID NO: 2026 - DNA, 300 bp, Homo sapiens
  misc_feature (1)..(300): DMR14:40587301
aaaataaaatgaatcagaaaggagagtatactgtatgattccatttacacgaattctaagacaggcaaaactaatttacgaggattgaaatcaactagttgttgctgttgtgagggggttggggcttaactaggaagaggcataaaggaactatctgggaggactggcataatttctttgtttccattgatagatgtgaagtgtatacaattgtgagaaccaatcagttgaacatttaacctccgtgtttttcatagtgtatgcatcaattaaaatatatattaagtgaatatatcttca

SEQ ID NO: 2027 - DNA, 2300 bp, Homo sapiens
  misc_feature (1)..(2300): DMR14:41349401
aggagccccatgctcccaggcacagctgcagccagccagctgcagctgcggctgcggacctgagcatccttgtgctctgaggggcccaggaatctccctgtccctgtagaactcagaagtacctgttcccactgcctggcctctccctgctcctggaacccactccaattttagagcaaagttgaagccaagcctgggcactgtcacgaccaagacaggtgtgcacgcattcagggtggtgctgacaccccagccccatgccacctctgtcccctctggactttggacaccaacaaaatcagggagagaggccggggctgggaggctgagagtggcctggcatgggcctgcagatgacccttggcacaaacagcatcggcactgtcgacagcatgctgatggcaggaagcagacaagttcctgggtgaaaaggggtgggttctcagtaaagccccacttttaagccaggaaaagactgaagtctgggggccaaactgtggctccagatgaagtccacaacctagagagagaacttatgtgctttttctgggcccacccatggccatccttggaccaatcaacgcacacttcctctcttctgagcccacaataacccagaacccagccagactcacacagacatggggaccaccagctgtaggaaggagctacccacttctcgtctcctcaatttgtcaggacgacctgcccgcaaaaaaggtttcctctccactgcgggtctctctgctgagagctggacacttgtggacgacctgcctgcagaaaggagctagccactccaggtctcctgagaaccattctgctgctcagtgaagctcctctccaccttgctcaccctccagttttccccatacctcgttcttcctggatgctggacaagaactcgggacccaccgaatggcgggactgaaagaactgtaacacaagcagggcttaaacagccccaggctccccaagatgctggtgacaagagggagagaagagctgttgtccttcggggatcccagacctaggggctctccatgccagtgctatgacaccctctttgggaatctgtggttcctggcatctccatgcttctgagcaccaccgtgttcccttcatcaatccgcgggtgcccacattggaagctgcgtgtggtacacctggtctagctgcagcctcacatggagccagtacctgtgttggctcctggagcttccctccctgctgcagcagttggcattcctggctgtggccagtggctgaaccacaagctcattcacacacacacccctcactgttctgtgcctggcttgcccatggcaggtgtgggatctgggctgatagcaccagtcaacctcaacctgctgggccaagtgggaaacacgagcccagcaggaatgagcaatactgaggcagaaggtgccgcaggccacagaggtttccggttagcaaagcaacacccctaggatactgtgacatattaaaagcaggtgaaaaagaaaagattatcatgccaaagagatgttctctaacctgtccaaaccattacatcattaatatttattaaacatagtctggttattaaataccacattaggaagagtgaagaaatcaactagatattgaagacacaagaaatactgtccaaaattcaaaactaaaaaatacaaacaaataaatgaaaaatgaatcatatgaggtaagtttaaatatattatcacaatacagatatgcacataggtaactttattttactgaactgaactcagtctagcaacatcttattgtctaaacaaatatgaacttgtccacatatggcagtatcatcacttctagtataaacttaatttttcacatttagttagtgtcttccaagtcaatacttagtctttccgtgtttttcctcctgcccctactctttgccttctcctgtggtggcacctggcttcatgggagagtttatacatcatcatggtattttgaagcgaagcttcactttcacacaaagcactttagattcaatgattttcatttaagtggttcaccttgtttggcctaggagatatgtaggcatctgctgttggcaatatctatgtttaaagtatgacttctagatgaaagatccagttactctgcaattgtctcatcttaatgctaaaatgctttcagtccactatcttgccaacacttggtggctgtgttggaattttcggatgttctctatactacagtggactatagggatggaggtggggcataggtgggggcatgtggttccagcagaagggctacct

SEQ ID NO: 2028 - DNA, 900 bp, Homo sapiens
  misc_feature (1)..(900): DMR14:44709001
tgaatacagcacactgatgggtcttgactctttatccaacttgccagtctgtgtcttttaattgcagaatttagtccatttatatttaaagttaatattgttatgtgtgaatttgatcctgtcattatgatgttagctgttgattttgctcattagttgatgcagtttcttcctagtctcgatggtctttacattttggcatgattttgcagcggctggtaccggttgttcctttccatgtttagcgcttccttcaggagctcttttagggcaggcctggtggtgacaaaatctctcagcatttgcttgtctataaagtagtttatttctccttcacttatgaagcttagtttggctggatatgaaattctgggttgaaaattcttttctttaagaatgttgaatattggcccccactcgcttctggcttgtagagtttctgccgagagatccgctgttagtctgatgggctttcctttgagggtaacccgacctttctctctggctgcccttaacattttttccttcatttcaactttggtgaatctgacaattatgtgtcttggagttgctcttcttgaggagtatctttgtggcgttctctgtatttcctgaatctgaacgttggcctgccttgctagattggggaagttctcctggataatatcctgcagagtgttttccaacttggttccattctccacatcactttcaggtacaccaatcagacgtagatttggtcttttcacatagtcccatatttcttggaggctttgctcatttctttttattcttttttctctaaacttcccttctcgcttcatttcattcatttcatcttccattgctgataacctttcttccagttgatcgcatcggctcctgaggcttctgcattct

SEQ ID NO: 2029 - DNA, 1300 bp, Homo sapiens
  misc_feature (1)..(1300): DMR14:44940901
accagcctgaccaacatggtgaaaccctgtttctacccaaaatacaaaaattagccgggtgtggtggcatatgcctgtaatcccaggtactcaggaggctgaggcaggagaatcgctcgaactcaggaggcagaggttgctgtgagttgagatgatgccaatacattccagcctgggcaacaaagtgagacacctgggcgacagagcgagatgccgtctccaaataaacaaaaaaaaactcatgtctctctcttcaagaacaaaataaaaccaaacaaaacttcccctgatgctatcagttactgccttaactctctccttcctgtctctagcaagattcttaaaagaaaagtcttcattcagtttatttccttactttgtattcacttctaggcccactgtaatgtatctacagcatttctacaactctgcttgaaattacccaccaaggccaggcacggtggctcacgactgtaatcccagcactgtggaaggctgaggtgggcagatcacctgaggtcaggagttcgagaccagcctcagcatggagaaaccctgtctctactaaaaatacaaaattagctgggcgtggtggtgcaagcctgtaatcccagctactcgggaggctgaggcaagagaattgcttgaacctgggaggcggagattgcggtgagccgagattgcgccactgcactccagcctgggcaacaacagcgaaactctgtctcaaaaaaaaaaaaaaaaagaaaaagaaaaagaaattacccaccaaaagtcattatgttctccataatgccaagtttaagagccacttttccatttttatctttctggatctttccagtgcattttacatagctgatcacattccttccttcttgacacacaaattccttggcttttatgactctattcacttggttcccctaccgctaaaattgttcctgctgccctcatcttaaatattaatgtttcccagattttcattcacaatcaatcctttttcctctctatattttctcaccaggcaaaaggaggaacatttaaactgtcaataactccatcaaagacttcatagttttaattcatacctctaaactatactatatgctgatgaccttcaaatttccagccctgagctcttctttgagctgtgcactcatatccagctaccatagaatatcctttacctggatatttcataggcacttcaaactcaatgtgtccaaaactcttcccctgaaagtggcttctcctcccatattctctctctctctgcatatatgaaccacccatgtaa

SEQ ID NO: 2030 - DNA, 1200 bp, Homo sapiens
  misc_feature (1)..(1200): DMR14:45732701
atgttaatggcctaggttttcttttaaatagaatgcattaaaaagatccctcttaatgcatgtgaatctaagcaggtggctctgtagtcctagtaacacatcagttgttgaccttcacttactcatctgaacatgtactgcattaaagtgcattttatatcatttaatttaaatacaattgaaaatgacttaaattctcctctacttacttggcagaggagaacaatataaatagtgctgtcctgaccatgattctttctgactcctcctccattgcaatgtaaattctcctagaacaagggccatgttgtctggttcattccagtatgtccagatcctgtaacagtgtcaccatattgagtatatttccaatatatttttaaatgggaatcaatgtctgtttattatatcaccattaaagtttcattaagtataaaatgtggtgatttttcacacctacactaggactagatggaacatccgattaaacttaggatattttagtgaattttgaattcattgctcagaaggttgttgttgttgttgttgttgtttttgacagacagcttgtagggaacttacagggagtagatcagtatgtgccataaattaagagaacactagatatggctgactagaaataagaaggtactttacccagccattatcttagccctcatcttatctctgtgagtggttctggttagaaggtggctaaagacatgagggtggaacaagtttagaaaaacgtgctctggaacatagtatggtgattcctcaaagacctaaaaacagaactaccatttgactcagcaatcccattactgggtatataccaaaaggaatataaattgttctatcataaagacacatacacatatattcccattgcagcactattcacaataacaaagacatggaattcatctaaatgcccatctatagtagaccgaataaaggaaatgtggtacatatataccatggaataatatgcagccataaaaaagaacaagatcatgttttttacaggaacatgaatggagctggaggccattatccttagcaaactaaagcaggaacagaaaaccaaacaccacatgttctaacttataagtggaagctaaataatgagaagacatggacatatagggggtgacaacagacacgggggcctaccagagagtggagggtagagggtgg

SEQ ID NO: 2031 - DNA, 300 bp, Homo sapiens
  misc_feature (1)..(300): DMR14:46935601
agagatttctcacatgtaatcacaaagccacttaacattaggttttcctgcccttcctttcttgctccatcttccaccagtccatgataaatgcccacaaagctagctagacaaagctaaccactgtcttcaccttcaccatcaccaccactaccaggtattctatctccagaggcttccaacacttccttgagtgtggaatgcagggatcggtatggcagaaagtgtttgggttgacatggagagttgggagaagttgcgacacttccattttacttgacagaactgatttattcatta

SEQ ID NO: 2032 - DNA, 300 bp, Homo sapiens
  misc_feature (1)..(300): DMR14:50765901
aggttagttacatatgtatacatgcgccatgctggtgcgctgcacccactaactcgtcatctagcatcaggtatatctcccggtgctatccctctcccctccccccaccccacaacagtccccagagtgtaatattccccttcctgtgtccatgtgaatagctaacatttatgtaagtgcttactctatccttggctctgctctaagcactttacatatactcactgatggaatttttgctacaacattttgtggtgggtacttttatttttaccattttatgcatgaggaatggaagta

SEQ ID NO: 2033 - DNA, 200 bp, Homo sapiens
  misc_feature (1)..(200): DMR14:51570701
cagttctgagaaccagttttagataggtttcgtaggccaaaggaatagaaaatatctctctgggtcgattgcatttaatggacttaatgtttcttcctttcttttctccattgccttttcttccttcagattcatccattcctcatttaacaagcttgcttcataaaatcatacattattccaaacatactatctttgtg

SEQ ID NO: 2034 - DNA, 900 bp, Homo sapiens
  misc_feature (1)..(900): DMR14:51762301
tttaatgtcactgggggtgacattacacattaaaaatgcgtattcaacacctgtgatactatccctaatatcctaggggtatgctcttccgaatgtcacatggggtgtacaccatgtgtgtacacgtgctgtgatattattcgtaatatcctaggggaacgttactcctgatgacacaggcagtgtacaccatgtgtgtacccctcctgtgttattattcataatatcctagggggatgtttctttgaatgtcacaaagagtgtacaaaacgtcacaggaagtgtacacgttgtgacgttatctgtaataccctagaaggatgttactcctaatatgtcacaggggtgtacacgctttgatgttatttataatctcctagagagatattacttcaaatatcacagtggatgtacacacatagtgtataccctgtgatggtattcataatatcctagggagatacaacccctgatatcacagtgcgtgtaccccgtgtgtgtacacccttgatattagtcgtactatccagggtaaatattactcctcatatcacacagtgtgcacaccctgtgatatttttcatcctactttagggagatattgcttctaatatcacagtgggtgtaccccatgtgtgtatactctgtgacagtatattttatatcctagggaggtattactcctagtatcacagtgggtgttcaccctgtgatatcattcttatttcatcatgcagcctttttcgacccacactgcaaaaggaatggaacagataagaaggtattgagattagaacgtgctgccgtgcggccgccgcaggacacttttcatatccctgtttctcggactgtagatgaaggggttcatcatgggggtgaccactgcgtacatcactgagg

SEQ ID NO: 2035 - DNA, 500 bp, Homo sapiens
  misc_feature (1)..(500): DMR14:52698201
gtactttttaaaaaatatttaattgacaaataataattgtgtatatttataggatacaatgggatgttttgatctatgcatacattgtagaaagattaaataaagcttattaacagatacattgcctcaccaacttttcatttttcattgatgagaacattaaaaaattattcttttagcaattttgcaattcttattaactgtggtcaccatgcagtgcattagatcactaaaacttattcctgcagtctaactgaaactttgcactttgaccaacatctcccctttccccatcctccctgcccaccggcctctggtgactacctttctactgtttctatgagataaacttttttagattccacatgtaagtgagattatgtggtaattgttttcttgtgcctggcttatttcacttggtatcatggcctctaggttaatccatattgtcacaaattacagaatttcctttttttttttttttttgagacggagtctcg

SEQ ID NO: 2036 - DNA, 500 bp, Homo sapiens
  misc_feature (1)..(500): DMR14:53021001
ttgacaaactttttcacttgtattgccataaacataatgagattgctgcaggtattctaggacaactttttggatctcatatatgtcctgtagcatatttctcatgtcagttagaccccatggtagcaagtatgccctcacgcctgtgtgcagttactgcagctgccaccctaattggcaaaggcggtactcttatattagaatcctccatttacctctatgttccccctactatgtctgtctgctttcttataagtttataaaacacagcacctctctacatgatgaccgaccacttcagaaaagccctgttaaccatccctccatcacgttacatcactgtaacactttaaatccagctactctaccacctctccctgctaatgaagagcttcactccatttctcatcattgccttaacactgtagaaatggtctcaaagccacgagcaaacctcttagctacccctttggacaacccagacttacttctgttttgtg

SEQ ID NO: 2037 - DNA, 1500 bp, Homo sapiens
  misc_feature (1)..(1500): DMR14:53359001
caataggtgttaagatattaaactagccaaattaattgtattctggttgaaaattacagttcatctctcatttttaccaaggagctgagctgctgggatgatggttttcatggtgtgccagcttggtagacaagctgtctaggtgttttgcatctcattgctttcctcaaaaagggtagttaaaggactaaagctactgaatggattttaggtgtaatctgttattggagagaaaaggttaatccagttctgcattattatgttttttatttatgttattctttcattgatttaaaatgtgttgagctctttcaatgtactgtgcattggccactgaacatctgtgcaaccagcaaatgccctggagacctgctctccagatttgcagactagaaggtaagactgacagtagggagacacataaggtccacaacagagtggttcgtttgagggttgggggaggaaaagagaggaggcattctggatcttctaaattgagctctgaaggatgagttaggagttagccagatgaagaacagagaggagggtcaacatctttatcttttggtagaaggaaaataacctgcttttgcataaaacagaatccagatggttttctatttgtttaggcaaacctgtgaacctcagtgtattagtctgttttcatgctgctgataaagacatacccgagactgggcaatttacaaaagaaagaggtataatggactcacaattccacatgggtggggaggcctcacaatcatggcggaaggcaaaaggcacatctcatgtggcggcagacaagagaagagaaagagaaccaagggaaaggggtttcccctaataaaatcatcagatctcatgagaattattcattaccatgagaacaggatgggagaactgcccccatgattcaattatctcccattggatccctcccacaacacatgggaattatgggagctacagttcaagatgagatttgggtggggacacagccaaaccatatcactcaggtaaggctgtgggaacatcatgtgcaaagacccactgtctgcacaccatggtttgcagaactgagaatattctggctataggaagagtgtgaaggtgaaagccatctataataaggagtttggacttccctctgtggtcagtggaaggttatttttgttgttgttgttcttttgagacagggtttggctctgttgcccaggctggagtgcagtagcactatcttagctcactctagcctctgcctcccaagctaagccatcctctcacctatgcctcccgagtatctgggactacgggtgtgtgccaccacacctggctaatttttatatttttttggtggagttggggtttcgccatgttgcccaggctcgtttcaaatttctgggctcaagcaatccacccgtcttggcctctgaaagcattaggattactagcatgagccactaagcctggcctactgaaatgttttcaggagggcagtga

SEQ ID NO: 2038 - DNA, 900 bp, Homo sapiens
  misc_feature (1)..(900): DMR14:53894401
aaaagtcttgcgttaaaagctaaatagccccagccccttccagttgcatcttctccttcctctagatatgcagtgaattcaatagacatttcaagtcagaaggtagatgagagtgaaacttccaaactaacaaagctgaggggcaggtgatgcttcacctgcccagcagaaccaatgcagggtgttgctttcagagcacaactctgtgaatagaaattctcggagccataaaatcagagctggttttttttagaagtggtgagaggacaggatgtagaggaaggagttttggttacggttttagttccactgatattactcatcaccagatattttttgacaatgtgcaaggcactgagctagatgctgaagaaaatccttagaaataaaaaaacatagcatctgcccttgcagaggaaagaagtcctgcccttgaacatttgtcctgaaatctcagaaggaaagtccagagattctcttgaggactgactgttctaagacatgtacctgctgatcacagatatcaataatcacagccacatggcacaattctctcctccttttttatttttccttttccttccttccttccttcctttcttttttctttctttcttccttccctccctccctccctccctccctttctttcttcctttcttccttccttccttccctccctctctccctccctctcttccttccttccttccttccttcctctctttctttccctctttctttctttcttttcctttctttctttctttctttctttctttctttctttctttctttctttctttctttctttctttctttctttctttctttctttctttctttctttctttctttctttctttctttctttctttctttctttctttccaggtctca

SEQ ID NO: 2039 - DNA, 1300 bp, Homo sapiens
  misc_feature (1)..(1300): DMR14:54701401
taaagcaaaacagcaattagaggtgtctcaggagccaagtcttcggtccattgcatattctagctttgagcccatagtcactctgagttagcttctcatgagaaaggtgcagtcttactgcacagagatgaggggagctctttttttccctgacaaatttctccatctaggaagtttttccaatttcacacaaatgcctttaccaggatttaaatcactttcaacagatgtctgggggaggtgaagcagcctcacccccaggactctggaatgggacctttgttcatactcacttttctatggagagcttcttagtcttagccccctgtctatcagggggtaggctagacctttctcagaaagaaaacagagctgcacattgtatttgattgtaccaaagtagttgtagcttttttggaaacacgaatgagaatttgattgagtactcaatatctaagaatgtttgatctgtgtttcattggagcctctggcccttgaaaacctggggtcagttaaccaatctgattcacaggctcttttgagaaaatatagccagactatgtagattgggaccctaatccataaaaattctctttagagtatctgtttagagtcactgtgggtgtatttgcttatttgccgtgtatatttcccttttcaggaatcattaaccaatggcaacaggaatccaaggataaagtgatttccctcctgttaactcatctgcctttgctgaagccaggaaacctcgacgcgaaagtagaatatatgaaactgctgcccaaaatcctggctcactctattgaacacaaccagcacattgaggagagcaggcagctgctgtcctatgctttgatacatccagccacttcgttagaagaccgtagtgctttagccatgtggctgaatcacttggaggaccgcacgtcgaccagctttggtggccagaaccgaggccgctcagactctgtggattatggacagacacactactatcaccaaagacagaactctgatgacaagctcaatgggtggcagaactctcgggattctgggatttgcatcaatgcctccaactggcaggacaaaagcatggggtgtgagaatggccatgtgcccctctactcctcctcatctgtccccaccacaatcaatacgattggaaccagcacaagtacaagtaagttccccggaatccctttaacgtagtctggtttggcgatttgctgtgtatgtggcatgtcctgctgacagtgtctgctccatgcaccctgtgaccctgggagagaaggactgattg

SEQ ID NO: 2040 - DNA, 3600 bp, Homo sapiens
  misc_feature (1)..(3600): DMR14:55071001
taatagaattgggtcatatgggattctaagccatacttagttttacgtaagaaaagaggaaatagaacattttaagttttgctctgattatgttttatgtcagagcttgtcgttttatttaatggtcatatagtctagctttccttaaagatacgtagatttaaaagccactttagagataaggaaaccaagtttaaaagagatacgcagtgactcatgcctgtgtaatcccaacactttgaaaggccagggcaggaggatcatttgaagccaggagtttgagaccagcctggacaacatagcaagaccccatctccacaagccaaaattgaagaattagccaggtgtggtggcatgtgcctctagtcccagctactcaggaggccaaggtggcaggatcacttgagccccggagttagaggctacactgcactccagcctggacgacagagcaagatcctgtttagaggttaaattcccagagtcataccacataaataatgaaccagtgcttctgttatcaaggcttagagtttatccactaggttctattttttttgttcaggcatctagtactgcagttcttccaaaactatctggacaatcaaatctatctaaattgaatgttatgtagcagacctctcacacttcatttagtgagtttcatcggatattcagttaaaaaaaaaaaaaaaagctaatggttatgtttgaaatgcatggttttgtgaataatcacagttcttcaagtgctaacctagaacttgagttgtgttttcataaaggcaaatgttcaaaggtatagcagttaagagtgggtttaaaatgtgaatgagagaattaaggtagtggatgatcaaaccactagttccaggtccagcctttgcagttaccagtcattggagacatggatatccagctaccctgcagtggcacacactaggccaaggctgtcagagcagctgagacagaagaggtctctgttagcagtggatgggcagccaagatgtacaggaactgcacagagtgtggaagagtcagagtgaggttctgccaagcacggcatgacagttctttttttaaacgtgccaatgcaggacatgctaagttaaaatatcttaactgttgcttagttactgcaacacacaaaaaccccaagtactaagcttaatgaatcacctgcgtcctttcttgaatgctcaaatctacaaaaagactaaactgcatgactaacgattaggactcttacttgggctttttatagaagtggaatgaagaggacttgtgcgaactaggaaaagcagcttcccagcataagatttctcgtctgaaaggggtaataagtctccaccttcgatgcctctgtgatcaaattctaaagggcagcccttcatggttcagcgagcaacacaattgctggggattcacagggcagagttggtatttttattttttacttttctttttaaatcagtgttgggtcacgaatttgttttttagggtttttattttaagctttgagctcagctctggtgtgtgatttacggcaactgattagcttcctgtgctcacttcccttacctataaacataataatgctcaaagtaccatgagggaaaaaacattcttcattccctctagctagagatccactaggtatgttagcataccccaaacaatgcacatctaatatagtagctctatatgaatattccttttttaaaaatcagattatcacccaggcgtggtggctcatgcctataatcccagctacttgggaggctgaggtgggaggatcacatgagcccaagaagcagacgtagcagtgagccatgatggcaccacgcctgagtgacagagtaagaccctgtctcaaaaaaataaaaattaggtgatcaacattaaggattaaatgttacacaatgtgattagctcttacctcacatgccggggggagcagggagtacacaatgtgatcctaatatttattaaccaccaaccttgtgctctaagcaagtggttatatgtcccagttggatatatggcctggaatcattctggttcctgtttgccaggtataattttttttttttttttttttttgagacagagttttgctttttccctccaggctgaaatgcaatggcatgatctcggctcactgcaacctccgcctcctgggttcaagcgattctcctgcctcagcctcccaagtagctgggattacaagtgcccaccaccacacccagctggtttttgtatttttagtagagacagggtttcaccatgttggccaggctggtctcgaactcctgacctcaggtgatccacccaccttggcctcccaaagtgctgggactacaggcgtgagccaccacgcccagactccaggtataattattaaagcacctcccttgcatccacaaaagtgtcctggtgtttgtgataagtcacatggttgtcctaaatataacaaaaaaagagtaccagtgaagattttatttcctcagagaaaaaacttgtcctaaaaaacatgttttactgtagaagttaccccttcattcacatacagtcggccgcttgtatctgtgggttctgcatctggggattcaaccaacctcaggtggaaaatatttcgaaggaaaacaacaataaataatacaaaatgtaaaatacaatatagcaactatgtgctagcatttacattgtattaggtattctaagtaatctagatatgatttaaagtataagggaggatgtgcgtagtttacaggcaaatacgacaccatttaatatcagcaacccaagcatctgtggattttggtatcccaggagggtcctggaaccaatcccctgtggatactgagagatgactatattatttagggtgctactcagactgcatcttataaaggtgaagaaccatatccaagtcactgaattgtagctacattatcttcagtaagtcccaacggcaagaagcaagcacgtcccagtcttggaacagggagtcatgtcttctaagatagaggagctagatagagaaagagggttggaacagggctttctacttttctgggcacctctccaaaggtttctgccacatagccacaattatgtctttttccctcccaagtcagaaagcaatttcccttaaagccctaagtttttcccccaacttaatccccttacaaactgagtagtaccaaaaattatgtccattttattgtattttagagatggggtcttgctatgtttcccaggcttgtcttgaactcctgggttcaagcaatcctcctgcctcggcctcccaaagttctgggattacaggcaggagccaccgcgcctggcttatgtccaattttggagggtctctggctgctgcatataaatattaccaaatatgtaatagaattacatttcatttcctccaaccctggggtgacatacacgttttgtttctaattcacagtaaagagggactaggggacagtgaaattattatttcatacgatacttgaatggcagggaaatagcaaaaacttgttaaatcatttcagaaatatctagtggccgggtaagagttgtcaactttttggt

SEQ ID NO: 2041 - DNA, 100 bp, Homo sapiens
  misc_feature (1)..(100): DMR14:55953901
aagggatgggatagggagaaagtctgtaagcttctaccctctcctgctcatatcgtaattgtggcacttaaaaaaaaacaggtgaaaagatggatgtaat

SEQ ID NO: 2042 - DNA, 300 bp, Homo sapiens
  misc_feature (1)..(300): DMR14:56280301
gcaattaagaaagtacaggatgggtttgggcatagttttagtggtatataatataaagtctagaagcacatcaaaagagcagaaggaaggaaaaaaacattcgtcagttaatgaatttaaaaaaaagagaattaatgaatatattccagatttagtactttaaaacaacaaacaattaaaatttagactaataacagaaaaaagcaagcataagttggaattgatgaggctttgcatttccatatggagagttaaattattacataaatgatgtcgaaacaaacatcaaaagagtatgat

SEQ ID NO: 2043 - DNA, 300 bp, Homo sapiens
  misc_feature (1)..(300): DMR14:57544801
cctcagtagccttgctgagctgcattggcctctgcccagttcaaacttcccggcagctttgtttacttcctacttaagcctcagcaatggtggacgcccctccccgcaccaagcttgagcatcccaggttcacttcagattgctgctgtgctggcagcaagaatttcaagccagtggattttagcttgctgggctccatgggggtgggacccgctgagccagaccacctggctccctggcttcagccccctttccaggggagtgaatggttctgtctcactggcattccaggcaccactg

SEQ ID NO: 2044 - DNA, 500 bp, Homo sapiens
  misc_feature (1)..(500): DMR14:62802301
gctactacattaggaaagttcacagtacctaaaatagccaccacctcatcatcctggatgacttccaaggatcctgacaccacaaagcagagggcatccacactttctccagcatggtaaatgaggtccccgggagcacagtgaatggtttggaactctaccgccaaggcgcgcagacacccatcgctggccaatcgaaaagcaggatgttcattaaaaaccttccggtttagatgaacacagatatcagctctcatgtccttgggacagatggagaggacctaaagaaggtgagagatgaataagtgaaaaggaaagaggaaggggccacttcagaaaaacaatcatccaacaaatatttattgactatgactatgtctgctacactgctacacaccttgctgggtactgggaaggcaaagggaacaagacacagctccgctctcaaggaggtaataatccactgagatgggctgatgagcatatggaccatgacaatg

SEQ ID NO: 2045 - DNA, 900 bp, Homo sapiens
  misc_feature (1)..(900): DMR14:63745501
ggaggaaggaaggagaaattaactaagatgggagctgaggaatctagatagtaatgtaatggggaaagatgaggttattaaggtcctgaacaagaggagtggcaagggataggagaggcagaggtagggtattcagaaaatatctcctgttagaataaaataatataaaatcaatttttagaattctacatacaaagatagactatgccaactaaaaaccaaatccaacagaattattatggtggggagaggactgctgcagtcctccctcagtatccatgggggattggttccagtaccccctcccaactgccctcataccttgtaatcgcccactgcacagacaaaatcaattcactgagactgcagcagtgcagtagagaaagaatataattgacacaaggctgacccatatgggaaaaaactggagttaccactcaaatcagtcagtctctcagaaggctcagaggctgtggtttttatggacaatttggtgggcagtgggggctagggaatgggtgctgctgacttgttgtggatgaaatcataggtgtaaggaacactgtcctcatgcactgagtccacctctggatagggccacaggagcagttgagtcatgagtcacaagtacaggtggggtccgtctgaaaaacatctaaaaataaaaccaatctgaggttctacagtagtgatgttatctataggagcaattggggaagtcacaaatcttgtgacctctggccacgtgactcctgagcagcagggggttggaaactacgcctacattttagcagagttcaagcatagcagagttcaagcccctcccatgatcctattcttgtggcctttcattagtcttacaaaggtaggttttggtccctgagcaaggagggcgttagt

SEQ ID NO: 2046 - DNA, 200 bp, Homo sapiens
  misc_feature (1)..(200): DMR14:65432301
gctggagattgtcatctaattgtcatgctgtcatgcttaacccactcaaatttgaattttcttttcttttaaaatgtattttttctactttccttttttttttttttaaattattggcttttccttcccattatccaaacttgaattgtgaatcatctttgtattccccgtcagattcattcgcttgtcaaactatcaga

SEQ ID NO: 2047 - DNA, 500 bp, Homo sapiens
  misc_feature (1)..(500): DMR14:65553501
gctatttttgtgtgtgcagatctgcatttttatctggtatcatactcctccttgaaaaatttcatttaacattttttatagtacaattttgccggcacagaatattttttaactttttttttctggaagagttttgattttgcctttatttgcctttgttttgccttcattttatccagtgaaaggtattatctagaatgctcagttgccgtttttccccccttggtattttaaagatgatgctccattgttttttgactggccttctttattacatgtagtgtgttctcatttttttttctctgtatgtaatatttcttttttcctagttacctgaaagatttttctctttcagtttgttttttagcagctttttgtctacattttaattttgccctactagcaattctctgcatttctttgacctgtggtgttttatcatttttttactttggaaaattcccagctaacatctctttaaatgtattttcttctctgtt

SEQ ID NO: 2048 - DNA, 1800 bp, Homo sapiens
  misc_feature (1)..(1800): DMR14:66023501
gtactatttttattcctatcctataaattgggaagctaaggccctgaaaggtgatgtttcttgcccgaaacctagagctggtaaagtggctgggatcaaactctccagagtctttgctcttaatccctttggtaagcatagtattctttctcccttccttcttctctcctccatcttccttctcctctgtctctaaataaggacctgctaagttctgaaattctaaatacatataaaaatgtaaattgtttcttttaatgtgcagtgctgccatatagtaggctgtcaatctagattgggtcttttacttgtttttctgtagagagaaggatcagcactgaggcatctgtatcctaaacctgtcgctccctaaagccaatagcatgaagctttgcaggtattttgtgactatggataaaaagatatctgatggttgggacataacctggtgcttggcagtatcagctggggctggaactaatgagccacagccccatttctgtgacccaacccagggtactctattctagggtgggcatttccaaatatacccaggtgcggagctcctgctggcatccccatggcctggaccagttttagttctgaaagggcctgcccaaatctttcctcaccacacctcccagaaaagcaggtgcacaagttggccagctggcagccaaggtgactgtccccatggtgtcacatgtgggttttattaaactgcagagcaccaatgctttgtgactagccagacctcaacagcctgcctttgtcacctgtgtcaccaactgtgtttcacttccacagctttattaggatgcgatggcatcttgcaattgctcctttgtttgggcccatggactggaccacatgtctgaggagtctcagtcgataggtctatcatatattaactacatggaaactgccttcctttttagcattcagcaaagaagaatgcaggagaaaggagatgcaactcccaattcaactttgttgtagagaatcaggtccaggcactggtagattgcctgggccaacagagcacaagacagaggagaggagagaatgaggaaaacagagatgtttagtgtgactctggaattcatcaagaaaggaatcaaagctgccatttgggcagggggaggtaataaagtaatgaactaaaatagctttcattcatcccactatccagactcactgttgtcaataggtggggtcatccctgtgttggttattctctatttgttccccacctccacccatgccattgcttccatccgtgctctgcccttttctatactactgttcccctaaaagctgctcctatagaccccatcacccagatccccttgcactctggcctacagttggtttgggacaatggaagcaccagcaggagatcagaagatagaaggggaggaggagaccagggcatttcttggttgtcccctccttgcatcagtgtcacccctctagcaggggccgagtgagcctgcctcagcggctacagctctcattgggctctggtaatggcctggggtggcgatggctttccactgttagtagttattgggtatctcaacatgcaaaggactgtcagcctgtcccacaagacttctcaggagaggaagacatgaagaaaataggaaagacaaagggacgtacagagagaaactgggaaacagagagcaagacagagcaggagagaaacatacctgatggcatgatatgagacctctcctagctgcccattctagtcacatttctgaaagatctttgagacagaacctcctatgcaag

SEQ ID NO: 2049 - DNA, 1300 bp, Homo sapiens
  misc_feature (1)..(1300): DMR14:66673901
atatttcaatacatttacacaatgtgtaattataaaatcagggtatttcgcatatccgtaatctcaaacacttaacaattctttttactgtgaacattcaaaagcttctcttctagttttttgaaaatatacaataaattctagtcatccatatttatactacagtgctgtaaagactagagcttactcctatttttcttttctttttttttttttgagatggaatctcgctctgtcccccaggctggagtgcagtggtgcgatctcggctcactgcaacctctgcctcccgggttcatgccattctcctgcctcagcctcccgagtagctgggactacagacgcccaccaccactcctggctaattttttgtatttttagtagagacggggtttcaccatgttagccaggatggtattgatctcctgatctcgtgatccacccgcctcagcctcccaaagtgctgggttacaggcatgagccactgcgcctggtccttactcctattatctacctttaagtttgtgttcattaaccagcctcttcccatccttccctacccactccccttctaagcctctagcaaccacaattctactctctacgtctatgacctctttttttgtttttaatggatactacatatgcatgagaacatgcagtatttatctctctgacttatttcacataacataatgtcctccagggtgatccatattgctgtgtatgaatgcatttaattctctctctcttttttatgactgaatagcaatcaattatgtatatacgacacatcattctctttatccattcatctgttgatggatgtttagtttgattccatatcttggatattgtgaatcatgcttcagtaaacatgggaatgtaagtatccctttgacataattgatttccttgctttttgataaatgcccattcctgtgattgctggatcagatggtaattaaatttttactttttgaggaacctccatactgtttttcataatggccgtactaatttacatatccacaaacagtgcataagttcctgtttctcttcgtcgtcaccagcatatgttatctttgatcttttataatagccattctgactggggtgagatgatatctcattgcagttttgatttatgtttccctgatgactagggatgttgagcattcattcatatatttgttggctatttgtttgtcttcttttgagatgtctattcagattctttttccagttttttttttttttttgacggagttttacgcttgttgcccatgctgaagtcgaa

SEQ ID NO: 2050 - DNA, 4100 bp, Homo sapiens
  misc_feature (1)..(4100): DMR14:67130501
tttttatccagtccaccattgaagagcattctatgtctctgctattgtgaataatgctgcaatgaacttaagagtgcatgtgtctttttggtaggatgatttgttttcttctggatatatacccagtgatgagattgctgggttgaatggtagttctcagttctttgagaaatctccaaactgctttccacagtggctgaaccaatctacactcccaccaacggtgtgtaaatgttctcttttctctgcagcctcaccaagatctattatttactttttagtaatagccatttggactggtgtgagatggtctctcattgtggttttgatttgtatttctctgtgattagggatatgttaaatgatcatatccctaaacatatgttcatatgtttgttggctgcttgtatgtcttcttttgagaagtgtctgttcaggttttttgcccattttctaagggatctaccttaaatatggaacagcagatgtcctagttttcttttccccgaggctggttcaataacctattagcctcctttagtcctcctagacagtgtgagctactgtaggggaagagttgaagacaaagaaatgtagatgggtaaataagtactgaatgctatatgtgctagccaagcagttgtggccagaacttagtaagatattggtcatttgagcacatatatttttctctgttactgctttttttttttcttttttctcagtttcctaataaatttgctttgagaagttgttgtcttgtatggcttaaacagggtggaaaaaggatttgtgagtattgggccagggttgttttctttcccaccagataagctccatgaatactaggacaaagtgtatgttggtaaacactatatccacagcacttagtagggatacattaaacagccctgccatcttttcctataccattctctctttccatgaaacctagaaactttcaattatacaacagtccagaagaatcttacagggccccttcaaagtaagtccaaaagccttgaccataggagcaggccagaaagtatggtactgacagtagagttgcattcctgagacacatccccaaaaaatgtacagtgtaaagctttgtggctgggtggttcattttatatttctgaagaaaagcatcttgggagaaattccaaatagatttagcaggcttttaatttaaaaaattgaggagcagctctctcaggcttgaaaagatcttacaaatttacttcttgaatataacaagcggtaatcattatccaaatagaatccacttggggaaatttttttaaataaatttcagcattaattgagtttatataattcctcaaactgattttaagtattgaataaggattcaactttatgacagctcagcaatatagcttctgaactgccaacttggaccttctagcctttcaaggcctgaaggaagggctgggaaattcccatcattaagaagatttcccccttctggaaaattgccatcacagaagcctgccccactcaaatcctgggcttacttgactatgtcatagattgatgttttgtatttgaactgcctcctcttgctgctgcgaatttgtgaagctacctctttatattaaagcaagaagcagaaggacaaatactgagatagaaaattgggttcttaaaaacctggcacatttagcaggaattatcaagatagacttaacagcacagtgattatttgggcaaagccgagtgccttacaacttccaatttgtgaaccaaacacatcctaatttttcattgcttacccaatgttcttaaagtaggagttttctaatcatcaacgataatttagatctgaatttaattggttcttgtcatttttataaactatctgctctccttatggcatgaacctccttttctgctcaaaatgcaaagttttcatttttgagtcaacataatagatttattttcttctttttttttcttttactcctagcaagctgggatagatttattttctgatcatttttcagcagaggtttctcattttctattggttaacaaagaacattctttctaccttaacaaacgtgtttaatgacgagaggttctttccgatctcagtgatagactttttatgtagctgttagagttgccctcctttatctttaagcgttgctattgcagttgacatttctgtttcttctatgaataacctctaggtattactgtagctttagacattgttttcctaccccaaactcataaaaagtaatgtcttccagaaagcctgtcctaattatctccaactaattctaatcattctatcccatttaccctttttgtcatttctttatattatatataaatatatgatatatattttttcattttaattaatgtatttgaattcaacagatgatattaatgtcattgcttatttcactcatttttctaactttttttcactgatgagttttctgcactagcttataaacttaaaggcaagaaccatgctttcttctttctttacatgactccatggtcccagaacacccagtgagactggaaaagaatgaaatgatggctatatgtgtagtatgtagtttgattccatacgtgaagtagacacccagaaaagatttgtagttaatgaatttatctttgacctctgaagaaactatgatatgataatagatgtcctcagctattttttgttaccttggtatgattaactgccaacattctttaatccacacatcctagactttttctctgtgtcatcttcactcatcttaaaatgatgcagcttgcagttggtgtaacagatgaaacaggaaactaattagcagctgttgtccatctgtgtgtttatattaaatattttaaaatagaaatgtatttgcattctgaatactgtttctgaaattcataaatcctaaacttgggtaaatgctgtaaaattcaaaaccaagacagagcctttaccatttatcttcatgataaagcaaaaataattttatgccagaatcaggattatagtaatttgaggcagatgtaaattttaaaaagcaaaaaaagtcttaacttttttaagttgctttggaattgagcccccaaagcaatcaaattgaaatctgaaaagatacagtgttcaaaagatgtcataccctctgaatatattctttcttcacagaaactgatgagtacatacacttttgagaaagctgcattcattctctgacagatttattttgaaacatgctcctcctttctctttttctacctttctattaagtgcgtggttctttgacatgtgatcaacttagaactctacagagagtgctattaatattggtagccatcttccaagttgaagatgaatgtcatggctttaggaagaaaagataccgttattcatttcactcaagtcaaataggcaaatgtttcttatgttcaaaaatgaaagggagaagagtattatctacaagacaagtatcaaattgcatcagtcaggtcagattggtgtttccctctatgcttcagtttatatgtgaaaagaaaatagtcattgtgtttatgtaactttcagtatttccatagaatcacagtatcttattctgatgttagctagtccagactttcacccaagggggtgttaaggaaaatctgcaacaacttagctgttaggtttttgtttgaattcttttagtgagaaagatctctactgcctcatgaggtagcacattctattgttcgatggctgttaaagtaagtatgtttttccattacacagagccagtctttcttcctgtgtctttcatctgttagccctaattctgccctccaagcaatgccaaataagttggcttcctcttttacatgatatttgaatatacagttgtttcaccttaatcccttctcaaagtactgtttatgattatatgtttagcagtatcttttctttcatcccagacaatattattagcctatgatattataattgagtaactaaactatttactcccaaagctactgtggatagactgacttgaaatcaagtttcattcagcccatttactgagtgcctacaatgtgcaggaatt

SEQ ID NO: 2051 - DNA, 4800 bp, Homo sapiens
  misc_feature (1)..(4800): DMR14:67576201
gtaatagaatcgcaaatttggaaagttgggttcatgttcacctgatcctcagtctttccaggtagccctgactcatgccaaccaaactagctgaaccccacatgggcttggtcccttcaaggagtcctccttggagctcttgcctccactcttcccaccccgtccccatccgatggctttccgccctcttccaggatacgtggctctaccacctcacagtggctgcaggtggcagcagtgccaaggtgggcactgcctatgagcagctcattggaaaactgatggatggtgaaggagatccaggtaaggcaagggtggccaccactgcttgggttggagggtagtggcttggtgactattggtcaagatcccaaagaaagcagtgttgtaccctgaagctgtttttaaaacatctaagccacagaggggaagttcccatccaagctccagggcccctctgtctccggctgagatactaaggtgaccactctgcatctgggggagtttatctgggaagcaggctttccagggacctgggtaaatgttttacttggatcaagctgccccgttgctggctgggcagagggctgaggaaagaaggtagctggttaatctatagttagagtttgtaaatcaacaagtgaagcctaaattgggatcggactaacctgtttggagtctttcttttgctactgattatcagggccctgaggaactaattaatggcatataccacacacacccctttactactgctctgaggcttgtttgtttctgaccaattcatatgcccctccatccagacttgacacagtaagaaagaggcctcccctgcacacatccacctgcactcagacacccacaaccttgcacactcacccctactgccattccacgagaaaggccatgcttatatgagggtgctcattgcagtgcccacctgtacaccccacactctatggatgataaacccagcacaacccaagtgttgacggaagataaaccactatcttccccataaattaaagatggcggtgagtgggagatgagtcccctctcagtagtaactgcccttgctctctggttccgtgctttgggcagattcgccgctctggaggcaccccatgctgtgctacagcaaagacggcctatacgcctccctcaccaccctgccctctgaggccttgcagacggaggccctcaagctcttcaaggtaaattggggtggcggccaggcccaccgctgggatacttgcaatacttgggtggagaaggcctgtgcagttggggacaacccacagagggatctggagaggaagggaaggaaacttcccagggtccctatcacttcctggatggcaggaatgtaatcctgtcactgggagggaagcagctctggaacgtcatgcacaagtccttgggaaatgccaatgaaaactctccctggaggagctcccctcctcctgtagttaagcagaaaaggcgaggtttatgttgcttctggactgagagattcggacctattttagcatgtcctttgtgaatgtttgagttttctgtttttgtttttgttttttttaaggaatttgtcttgtttatgtaatgtaatgagaacattttaaaaaggaaacttctatcccaaagtagcccatagccccttttagtaagcagagatgccctccaacagtagcagtgctccctcttagaaagggctgtcagtaaactctaacctccctggagcccttggaaaatggccaagccgttgagttctctgaacccaggggatgctggtctgcctgtgctcactgctgttccctcccagtcctgccagctcttcatcaacgtgccggtggaagctgcctcggtggactaccatgtgtccctggcccagaccgcactgcaggtctgcctggttcaccccgagctgcagagtgagatctactgccaactcatgaagcagaccagctgccgcccacctcagaagtactccctcatgcaggtaggcatgccaggggtggagcagctgacagaagccattggcaagggctgccaggtgggaaaggtgggaggaggtgactgggcaggtatacggtgagcccagccagcgggcagcctctgtgctccaagctgcatcagtacggctgagctgtctatgcacagatgggtgattgcattctggacacagcctgaccaagttggccatcccagcacccagagcaagttgggggctctggtttggggaaagagtgctgaaggctctgtagctcagggctatgaggacaggtggtgctgtaggcccagcactcaccccacgctgtctgtgtccctggcagtgctggcagctcctcgctctgtgtgctccacttttcctgcctcagcatcacttcctctggtatgtcaagcagcagctccaacgccatgcagatcccaggtgagtgaacctggccgtttcctctgccacttgagcactgccaactgccgcatgaataagagggatgagaggagtctagggcagaccagatcactcctgtcctctgaaaccgctcagtggtcgtggagacttcacccattgccgtgtgcacaaatgggcacgtgtggatctgggcatgcttaagcttctctgcacgccaatccatgtatccacggatgtactgtggcaactctcacatgaagccacactgctcccaaactgtccccaagtgctattctgttgttatgtcctctgggttctagaagaaaatatccatgccagcaacctgctatataaaggtcctgaatgacaaattaatgtcccagaccagagtcttcagggcttttctcacaacctgccccagctacagttttggtcctggctgagtctagatagggatccggggtgccaaagtggcagagatgagcagagcccataatactcccctcttccgtctttttagaagtgaaactggccagtatgccacctactgccagcgggcagtggagcggaccctgcggaccggggagcgggaagccaggccatcgcgcatggaagtggtgtccatcctgctgcgtaaccccttccaccactccttgcccttcagcatccccgtgcactttaccaacgggacttaccatgtgaggagctgggcgtgctctttgccccgagtcttctcacgtcaccatccagagaatacccctgggccttaggctcaggcttggcagattgttcactgttgccccagaagtagatattatgaactcactgcatgaacagggaagctgagatgctgaccaagaaataagaaagggcctccaaaagattgttggtaaaggagggacccaggtatgcccagttcatttacagtggataagctcacatccctcatgcactggccctttgcctgtgaacacagaaaccaacttgctttggccttttgtatttgcccttgctcctttccacctgctgtatccagacacctccaccagccctagtgagctcctctcaggaggttcactcagggttggaactcttctcccgcctcaggtggttggttttgacggctcttccacggttgatgagttcctccagcggctgaaccaggagataggcatgagaaagccatcccactctggctttgccctcttcacggacgatccctcgggcagggacctggagcactgcctgcagggaagtgtcaaggtgacagcctcccactaagccagctgagcccctccctgctcagggatattggtggtggggaaagagcccatctgatgggtgtctgactgtttggtagctcatttggtgctgagcccaaggtgctgccctagtcagcatttctgtgccatcctaaaatgtacctgggcagggagaaaaaagctgttgtgtgcccttgtctctggagacaagatcgctacacacctacttccctcgagtggctgtgcagcgtccagaagaaaagcctcttcttggcttggtgtagggacagtgaggccccacgaagccactgcctacacgtgcccactcagaggctcacagctgtgtgcttggaccccctggatgtcaggtggtacccagcacctcacttttaccctttctttcagggcctatgccatgcttataggttgaaccacacttttaaagaggcaggtccttatggtgctcctataagtaaaggccgttggatgggatttaagatcaatcttgtattgtggtctgggattactgtcctgggggataagtgtttgtaagaatgtgctctagcactttgatgcatatttggctccagtgtttgcttgtctttaacaggacaaaggcttctatggtcttttaacattgcctggaaaaactatgccacataccttctttgccaatgtctgggcatctgtgaggctttgttacatggtagccctctgggcatatttgttgaagaggagaatagcagtcagtggaatggaaatggagctggtgttcgaaggccatggggctgcctagcctctggggaggcccctcagctggtgacaccagcagggcagatttcttgctttattgctcaccctgtccagggttccctctgtttgtgagggagctgctgccaccttgggtccaggaagcatgaagctccgcaggtcagcctcctggtgggaggacttttccttagttttctttgctcttctgctctgagtccagccctggctggaccttgatcccttctctccttatcaggaaattttctgactttcttcttttgccttttcaagatctgtgatgccatctccaagtgggaacaagccatgaaggagctgcaccccggaaagtctgag

SEQ ID NO: 2052 - DNA, 2000 bp, Homo sapiens
  misc_feature (1)..(2000): DMR14:68286601
ctagtactcatggaaggctccagtatacaaaatggctactcatggggccccctccccttccaccccaccaaagatatttctaaccttcaatgtagagtaagttagaattgacatatacattgtcccttaaaggccaggaacattaagcttgagcagagggtaggtgtagcctgggtatagtctagtcatagcctagctaaagaaagatgagtcagctgaaggcagagggtctgcattgggcacatagactggcagagagttgggctcagttggctcaatcctctgactaatgaccagttaattctgcttattctctcttaactcaaggtatttgctgccttaagctactttttaaatacttagtggaaataagtcatctattttcattagtgtgtgtgttgtgtgtgtgttggttggattttcctggccaggagcctctgccttctgaccaaaatgacattgattcccagccttctgccttagcagttcatcccatctttaactggttcccctctatctcttttctctagcttatatgccttgctggctgtgaaaggaggacctactgggtggtctatgaatctataccccgtatttcttttttaaagatcttaatttttctccctatttttccttgtgggaaggcattaaaaatgggactcaaggtctatgtgacactatatgaggtgccatttcctatacaggtgcacctctgtaagcagcatacagttaagagggcaatgcaaagaagctttgggagtaagcattctctcatatataaagttgagttgagacagaagttactttatacaaatatagggtttcttgttccttctaataggtggatggtattcttcttcctcgagagaagctgattaagttggattctgtctattcctggcttcagacctaatcatgaccattaaaaatatctatcttttcctttgtccaagaatcccactctggtcttgcattgtaattggtggtgttgggggtgtgttgcgtgttttcaataagccttattttagggaaatagcaaaaatagcatatgtactttcaattaaattgttattgcttttgaacatattgacagcaaatatttgttatttgtcagtagtggcctatatgctgtataaaagggaatcaggcatgggttttatagctaaacaagcaaggtataaatcagcaaaggataactaatgacagtggtggggtaacattttccataggccgggtactgtgctaaggactacctgtgcgttatccagctgaatcctcagaaccatgtgagctaagtattatcatacccagagagactatgaagcttgctccatgtcacacagcgagtaaatggtagagcccaggatctaagttcaggtctgattccaaagcccttgtcctaaacactgtgcaaattgctcttacacaaatttagtactgagcatcagaagactcagtctttcccatggagcaaagcagcaggaaaaccccatgaagcgtcagttagaaaccagactgtgttgagtctgtttataaattataatagtatttcatgtgttattttaagagtatagttttcaagtctcttgattgcctcagaggaaaatatacctatagtcttcttcccaagttgtgatgattgtaatcaatgctttgggaaatgttttcattctatcctttttgctgaaaacagatttagaaaaccacaacaattcagtaagatggcatgattagcaaagccctgagtttggttgctatgtatccctttggtgatttggctttaagacatgtaattaaaagggagaggattattagcaaaataagttaggagcttgttcttttgccattggggagtgaatattttcttccccatctactctttcaccagaagtggaaatgatgctgggtatcttttgaggtatatctgtagttcagttttaggttctgtaaggtagcatttcattagttctgtacaataaaaccgtcatctcagtacaggt

SEQ ID NO: 2053 - DNA, 1200 bp, Homo sapiens
  misc_feature (1)..(1200): DMR14:70150301
taacttcctctagttcaggtcaccaacaagtagctgggactccaaatcagcctgtctgataacaaggccacatatttaatcatgctgctctattaccccctgtgtatatatgggcttccactcacatcgctgctttcacacttctgttattggtgattttattgtggcaatgatgaggcaaacttctgtcttgaactcatcaagacagtgataggatcatcaagcagtgataggagggtaggaggcaaacccggacatgaactcaatgcctcctaccctcccatcaccgctgctctcctcttgtcacagacagccatagcttggctgcccttaggttggccttgacatcttcagctgtgccccagccaggcctgcctctctttgcagaggaaagcaggtaacatgcctgcattttgggataagcaggtaacacacctgtagctcaggacaagctttaaggcaccgaggaactccagagggaaaggggatttggagaataggcccttttttgtctccctagtcacaaaatgactcttaactatacagtgggtccttgttttccatggcctagagttcagccatcgaaaaggtcaaaaagcagaaatgagcaatgcagttcatggctgcccctgcctaggctggaacttctgggcagttgtttaagaactatctggccaggcgcggtagctcatgcctgtaatccccgcactttgagaggctgaggtgggtggatcacgaggtcaggagttcaagaccagcctggccaacatggtgaaaccccacctctgctaaaagtacaaaaaattggccaggcatggtggcaggtgcctgtaatcccagctactcaggtggctgaggcaggagacttgcttgaacctgggaggcagaggtggcagtgagccgagatcgtgccactgcactccagcccaggcgacagtgcgagactccgcctcaaaaaaagaaaaaaaaaaaaaaagaactatcaaggaaccagggctatggagattggaagatagaagaggaggccattataacagctgtaatgaagtaacaaaacagattggggtatgtggcttagagaaagtggccatttatttttcaaccctcatctacttgcaaacaggaattcaaaaggtttacaattggaacccctatataacaaagttgttgaatgagctctggcctactcctgccttgaga

SEQ ID NO: 2054 - DNA, 1600 bp, Homo sapiens
  misc_feature (1)..(1600): DMR14:71594701
ttttaatgcccttgcctttcatgtttttattgaagtatttttcaatgtagtttcatttttaaacactctatttatatataatctatgtaattcattcgaaggtagctctctatgtattccctcacagggagatttgaggcactaaatgccttcctgagaagctaagctaggagtgtgttttgctgctgtccttttatctgctcagggcttccagaagcaagaaagctagtagtaggtattgtggttttgtgtgtttgctctttggaaagcagaggtcctctcttttcttcactgtgatctcaaagtcccagcgtggctcagctgcaagcgtggctcagctgcaccctgatctggaaggctttcacagtgcctgagcctctcaagccagaggtttttggaagctgcttaaaagggcgtgggcttcaactgctcctacatgtgttttattttaaaatcaagataggccatcaaagaccacactagttcaacacttgactttattaaaggtcatctttttaagagccagtcatataaaaacagagtttgttttgcagtaaagctggtgatgaagacattttcattgtgtcattcatcagcccctttagaaagttcacgtgaaaaatttattttagaatttgatgccagaagttgaaaccggtagctaccaaatgcctgcctttctgatgataggtattttgtgtgtgtgttttgtttcactgtatgtctagttttacttcaactcccagaaccaaatttgatgctcaactatacagctttgattattaacacatctgcttccactttcatcttttattttcctattctgtttcattagcatgatttatatatatcctgtatcattaatgacctcaattctttttggaaaaagatgattagcctacatttatatccaaataaaacgcctttgtccccaggctttctccttagttccggctgcatttctcaccagctgttaatctgcctctacccagatggctacctcattggcatctgtaacccatgtgcagagagatttggagttcaccattttttcccctcctcatcattgctctccttctgtaaattaaagcttctttgatgcctcctttatcttcattgtgttcaacctacgatctctagtctaccttcaaattgcaggtaacttctgttccttctgtcccattcccaattctttatgtaacttcagggcctcatgcttcttacccaaattctaggtttcttagtccctttatagtctaccctgctcaaaatctaaccttttgtctttgccagatagtcctttattcaatcatgtaacaaacatgtgggtcatctgagaggcagatgctgagactatacaggactgcaagtggttaggggcttggatgagagtaacttaggtctgtgaaagataatttcgcagagaaaggcttcagtccttcaaaggaaagaggagacaaaggaagattaggcagggagagcctcagaccgtgatgcaggtctgacaaagtgtcagtcaatgcaaagggtcaaaaatgagcattagagaagcattactagagcattactccttgttggggagtaatagccaggtcctgtt

SEQ ID NO: 2055 - DNA, 1800 bp, Homo sapiens
  misc_feature (1)..(1800): DMR14:71793801
tttggatattaaactaaccttgctttcctgggataaatatcacttggttatggtgtataatttcttatatgtgttgctggattggtttgatagtattttattgaggatgtttgtatccatatttatgagttattggtttgtgagtttttttttttccttctgatatgtttgtctcattttgatgtctggctagtactggccttatagcacgaattgggaagtagtttttccccctctgtattttggaagagtttgggaaatctggtattacttctttaaatgtttagtaaaagtcagtagtaaagacatctgggcctgggcttttcttcacagcttttttttgttattattcaagtacaatgtctttactcactatatgtctatttagattttctatttattcttgagtcagttttggtagtttatgtctttctaaatatttttccattttatctgtggtatctaatttgttggcatatagttgttcacagtgttcttttattatttatttatttagagacagagttttgctcttgttgcccaggctggagtgcaatggcatgatcttggctcactgcaacctccacctcctggattcaagcgattctcctgcgtcagcctcccgagtagctaggattacaggcatgcgccaccatgcctagctaattttttgtatttttagtagagatggggtttctccatattggtcaggctggtctcaaactcctggtcaggtggtctacctgcctcggcctcccaaagtgctgggattacaggtgtaagccactatacccagccttatagtgttctttaataattatttttatttctgtaggattggaattaaagttctctcttcattcctagttttagtaatttgagtcttctctctctttttctctgccagtcaagttgaaagtttgaaactttaaactcttttcaggtaactgacttttgtgttcattgattttctctattgtttttctactgtctatttcatttatttctgctctaaactttattatacccttctatttgttttgcatttaagttgctcttctttttccatcatcttaagatagattattgatttgcaattaaatattttaacatttttagaatggttttacattttcatatgttatcacatcatttaaaaatcaatcgcctttatttaattttttaaaaatttgttattgatgcataatatttatacatatttatggagtacatgtgatattttattacatgcatagactgtgtaatgatcaagtcagagtatttggggtgctcaaaaccttgcattttttttttttttttgcaaaatacctcttaatctcatattgaaaatgcagcttgtatgtgggtgcaggatggctataagaaaggcatacctataggctgtaatatgaatttttaaaaagtgaagtcattatatgacaacttaaagcaaaaggaaggtgaaagatctaatgctggggaatttaatgtctacaaaaaatggtttgttaactttagaaagaggtatggctttaaaacagtgtcaatataacaggagaagcagcttccactgaccaaggtgcagtggatgagttaccagatgccattaagaaaatcattgaggagaaagtatatctgcttgagcagatttttaaatgtagatgaaagtgccctactctggctaaaaatgctgtgaaggacatttattagtaaggaagataagtgaacatcaggatttaaggcaggaaggaataggctactcaactgttttgtgcaaatgcagttgggtttatgatgaga

SEQ ID NO: 2056 - DNA, 900 bp, Homo sapiens
  misc_feature (1)..(900): DMR14:72735901
gggtagaagatgaggcttatcaacttttgttttattctattcaaaacttagattcaaaattagatcatatacgtaaagaatctacaacatggtaagtatcctaaaaatgctagatgttattccctaagtttgaatagttttgatttcaatggtacagctgcactgtccaacagaaatgtaataccggccacttatgtaatttttaacttactagtagtcacatgtagaaaaaggaagaaagtcaggtgtcattaattttaataagatattgtatccgatctggtatttctaaaacattaccattcaacatgaaatcaacataaaaatatggacgcaaaattttacattcttttatctgcattgtcttcaaagtctggtgggtattttccatttagagcgtatctcaattcagactagccacatttcaagagctccatagccacaggtggctaccagctaccataatggacagtgcagatttgcagcattaaaaataacattaactatgactttgcttccaaaaaatggaaagaattttactgtggttcttaatgttgtccacgtaatagctgccgagtgccattccaagagcagagttctagcggatcactgcaaaccctggttgcaaagcatgatgggtaaggcctgcaaggtcagagtgaaagggtagccatccctccctacaaacaaacacagggtgcactctgcctcctgaccacaggaggtcccagaatgaaggaggaagaaaggtaacaggtccaagcccttgcacaatgtatgtcctaaacacacttctattgagcccttagggatttcatttatccaattttatttgaatatggcccatctggatataggatttaataattctttgaaagtgtactcattttgaacctcaca

SEQ ID NO: 2057 - DNA, 2900 bp, Homo sapiens
  misc_feature (1)..(2900): DMR14:73095401
gagaccatcctggctaacacggtgaaacccccatctctactaaaaatacaaaaaaattagtcgggtgtggtggcgggagcctgtggtcccagctactcaggaggctaaggcaggagaatggtgtgaaactgggaggccagagcttgcagtgagctgagatcacgccactgcattccagcctgggcaacagagcaagactccgcctcaaaaaaaaaaaaagaatttgttgagcaaattaatttaagaaataaaatgtttgttgaatacgtatccattggagacagctttcagaatgcttgtggtcaacttataaagttactgctaagttacattgttaaggaggcacaaggcatgaaactcaccttgaatagagttgcaggaattatgaccaagagccaggcatgtatgcacatgagcatggttcttgtatgtatctgaaaatgtgcacggtatatgtttaccaagtaagtcgttaaaaactttggggcatgcacaactattgtagcacaactattgtagcacattagaagccaacaattttccccacatagagggaataatctagacttcttagaaaataataattattattattgagatggagtttcgctcttttgcccaggctggagtgcagtggcgtaatctctgctcactgcaaccactgccttccggttttaagcgattctcctgcctcagcctcccgaggagctggaattataggcatgcaccaccgcactcggctaatttttgtatttttagtagagtggggtttcaccatgttggccaggctggtcttgaactcctgacctcatgatccgcccccgcctcggcctcccatagtgctgggattacaggagtgagccactgcgcctggccagaaaattattgataaagacctacaaatacttactttgattccttgttagggttgtaagtgtatggtttctataagtggtatgtattcctgcattataagcactcgtagaaagcaaataggaaataagccatcattacagcccctaaactcccgattcttgcagtttggtatatttagcaatctgatgtttttgtttgtttgtttaatctacatacaattttgctttttctgagtggtagctatcacaattaacttaaaattgtattttgcctttactacgtaactgaattttcaactgtttaaaagagtcgttactatttgtgtacctattgagcaaaacagtctgaaaacttgtgaatggtttgcagatgtgtcgtatagtgtgctagtcctgaaatttagggaccagaattttttagctattaagaaaaagaaaatgaaaatgaagtagtatctcaggaatagttaaataaaaaaatgaagcttttctgatgttaagaacaaaaccaattctgtgtttaataggactacagagatgtttttgagaaaacatgtatgtttattaactcttgttgtagagtgattttgattttcttgcttgatttttctttcccctgaatttgctgttttgtttaagaatgcaaggccagaaactgtcactaatgacgatgaagaagccttggatgaagaaacaaagaggagagatcagatgattaaaggggctattgaagttttaattcgtgaatactccagtgagctaaatgccccctcacaggaatctgattctcaccccaggaagaagaagaaggaaaagaaggaggacgtatgtgttctgacaacaacatatcatttctaccgtttgttttttatgatatcactcttatactttgattacatgtcagttttcttttttcttttcttttttttttttttttttttttgagatggaggctcactttgtctcccaggctggaatgcagtggtgcaatctcagttcactgtaacctccgcctccggggttcgagcgattctactgcctcagcctcctgagtagctgggactacaggcatccgccaccatgcccggctaattttttggtttttagtagagacggggtttcaccgtgttagccaggatggtctcaatctcgtgacctcgtggtcgacccgcctcggcctcccacagtgctgggattacaggcgtgagccaccgtgcccggccacattttaaacttttttacagagacaaggtctcactatgttttctaggctggtctccaactcctgggttcaggttatcctcctgcctccgcttcctaaagtgccaggattacagtcatgagccactgcgcccggcccctattttactttgtttgcctatggttgttctgtctctgttctaagcaagaaaccagatctgattcactgaagatttccacccactcttaatttttagctgcctttccttaagaaactatgtcacattcccctccctgaacaataatggtattgaataatcaaactggaggattctgaaagagcagtacaacttgaaacattcctcctcagtgaattgattgctacctctttgtggccctaagctaattgtccaggttgaaagaaaaggtttagttttctcatacttatttcctttggataaacttagataaattataggaagtgttcttttaaaaatactggaagaagccagaagtggtggctgacacatgtagtcccagcaacttgggaggctgaggggagaattacttgagcccatgaacttgagtctagcctgggccacagagcgagacccttctataaagtaagaaaaaaaatcccacaaatattggaagtgttttatttatgtttttgagacagtatcttgctctgtcacacagactggaggatggtggcgcaattacggctcactgcagccttgaatacccatcctaaagtgatcctcatgtgttagcctcctgagaagctgagactataggcatgtgctaccatacccagctaatttt

SEQ ID NO: 2058 - DNA, 600 bp, Homo sapiens
  misc_feature (1)..(600): DMR14:73134901
agattgtttctaagaatagttcatcagcattttaagacatcctattaatattagcggactgcaatcagattgaagtagttcacaaatagatgggttttagcctgtatttgttcaatactgaactattgtatgtatcaggcactgttatgtatcaggcactgttctcagcacttgtaaaatgtatatgtgctgctgacaagcatgagcacttgtaaatgaacaaactaaaatccctactcttgttaaagtgggggaggtgaagaattttaaaaacatcttttttcgttcaaccttctcccacaacttatctttcattctgctaatggaaaatattacttttgttcttaaatatgaagcttttgtgtgtaaaaagtattagaatctcatgtttttgaacaaggttggcagtgggttgggaggagggattggagattgatgcgataggaatgtgaagggatagcttggggtggattttattttttaattttaatttttattttttgagatggagtcttgctctgtctcccaggctggagtgcagtggtgtgatctcagctcacgggttcaagcgattctcctgctgcagcctcccgagtagct

SEQ ID NO: 2059 - DNA, 2000 bp, Homo sapiens
  misc_feature (1)..(2000): DMR14:74972001
gcatggctaaatttttttcttttctttctttctttctttctttctttctttctttctttctttctttctttctttctttctttctctttctttccttctttctttccttccttcctttctttctttctttcctccttccttccttccttccttccttccttccttccttccttccttccttccttccttcctttctttctttctttctttctttctttctttctttctttctttctttctttctttctttctctttcctttctttctttttttttgagacagagtctcctcctgtcgcccaggctggagtgcagtgccacaatctcggctcactgcaacctccacctcccagcttcaagtgattctcctgcctcagcctcccaagtagctgggattacaggcacctgccaccacgcccagctaatttttgcattttcagtagagacaaggtttcaccatgttggccaggctggtctcgaactcctgacctcaaatgatccacccaccttggcctcccaaagtgctgggattataggtgtgagccactgcgcctggctaaatttttcttttcaaactcacctataattgggctttaggatttacctaatgttttctccattattaacaatgctgtgatggacatctctatatgtagttgctgctcatgtcctttaaattcctagaagtagaatttctgggtcaaagctttcgatacttattgtcaacttgctttacaaaaaggtcatcctagtgtgcagtccttcctgcaacgtctaagagtgatgagatccctacaccctgacagtccctggtactatcattctttgacatctttgcccatgagttccatgaaagtcgtgcctcagggttggctttggacatatttcctttgttattggctggtccagttgaacatttctctgtgccagtgttggccatttgcatttcttctggctgtgtgcctgctggggtctttaatgcctgaagcccaccaagatagtgggagatgttgccagggagggctgcagggagtgtggcctgagcccagccctgatgcagagtcctgcacatagtggtcgctcatgttgctgcctggctgagggcacagccaacttgggccaaaactcagacccagcctggcggcgctcttgcggtcccagccttgtgctgtgtccagaccccagagcaagtgcccagccaaggtctcacctcctggcctgtgaggcctgggtgccggctgccacccaggatggtgcttgcaggccgggccaggcaccccatgattccccaggcagcaggcgggtggccaggtgtgctgggaggagccagcggtgaggacaattcagggaagtgaccctgcccagtccccgagctcctaccacagcaagcattgtgagcctcccgctggccacggtggctgaagctgctgacagtggcggcaggaagtggggcgcttactcagcccaggctgcacgtggctgggcctgctgcctccctccactcagccttcctcccagacacagcctgcgcagccagcagctgggggaaggaaacaggagggaccaccccccacatcccctgcaaggctgtacctgtgccctgccagctctgccacctgttactgactgggcatgaggcctgccccagggcctctgcggcagagcgaggagtggggctggggtgtggggtgggcaggtgggcttggggtaggatctgcactgacatctactgaacgtaccaccctgagggtctcactccacccaatccccacagccccgggactacgagtactattcacctccctttcactaacaaggaaattaaggctcagaaaacaggagtaatgatagcttaatctagaattacttccaggtgccaggaactctgctgcacacttcatatgtgttcggttatttaagcctcacaagaagagtgggtgcaataggagccccattttccagatgaagaaagccaggcatagagaggtggcagcacacagc

SEQ ID NO: 2060 - DNA, 200 bp, Homo sapiens
  misc_feature (1)..(200): DMR14:75004301
gttgtaaggagctctgtagtgacagaggtggttcataggtaggggtacttctggaagagggcaggcagaaaatcccagaggagtggggcttttaagaaattgtgacatagctgggcatggtggctcacacctgtaatcccacaactttgggaggccaaggtgagtggattgcttgagaccaggagttcaaaaccagcctg

SEQ ID NO: 2061 - DNA, 2800 bp, Homo sapiens
  misc_feature (1)..(2800): DMR14:75344501
cattcaagaaaggccagaaatgccagggagttaacacttcctaagagcagtccttggccaatggctgttggagttggaggatgaataccccattttttttttgtctcgggtgagatgactctgtggctcatgttctacagtgtttctcagagttccccagtaggattaagttccagttgctcagtgtggtcacttgaatgatgatacactctgcattgacttccttccttctccatcttactttcctacttgcctactggtatttcccagaacttcctcccaaataaattctcacacttgaatctgtctaaaggtctgcttttggggaatccaaattaagatattccccaatggaagaccagatgctgttgccaagataagggaaaatggatactgggtagataagaacaatggatgtcagcctctcttggttaaaagatttgggaatttagctgggcacagtggctcatgcctgtaaccccagcactttgggaggctgaggcacatggatcatgaggtcaggagttcaagaccagcctgaccaacatggtgaaaccccgtctcactaaaaatacaaaaaactagctgggcatggtggcgcgtgcctataatcccagctactcaggaggctgaggcaggagaattgcttgaacccagaaggtggaggttgcagtgagccgagattgcaccactgcactccagcctgggtgacagagtgagactctgtctcaaaaaaaaaaaaaaaaaaaaatttgggattttaattttttttttgcctgggactgtatttgtctgcctcttcctagaggtaggcagtgagtccactgatgggaaggccacagcctactcactgtggtggtcacagacctggtgcacagcagatgctaaaagtatttgttgtactgaattgaattttatagtcaatgaagaatcattaaataattttgtgaactcagaactggaagaatgtgttttgtttgttcaccaagattctgtaacctggtggcagtgtggaggatacattggggaaagggaagatagagagactcattcagaggcgatcacagtagtttgggcttgagatgataagagtcgggaccaggtagtggatgcaggagtgtgaagaaaaggtcagaggggtgagactgggcatcggtggaatatgggcaggagatgagaccatggcttagtaaggagaatgataatttcttcaggagttgctcatctggccaggacatagcatagttgcccagtttcctattgttaggggatttatagaatttctaccatagttcttcttctgaggagagtgtgtgtgtatgttggcagggggtgatagctggaaaaggagttatctaagggcaaaaatttattaaggtctgtgatggttagttgtatgcatcaacttgactgagccatggggtgcccagatatttggtaaacattatttcaggtgattctgtgagggtgtcttcggataagtcttccacatttcagttgataactgagtaaagcagatagttctccctaatgtgggcgggtttcctccagtcagttggaggcctgaatagaacaaaaggctgaccctccctggaagaagaggaaattcctcctattgactgtcttcaagtgggaacattggtttttgggttttttcttgccttcggactcgaactgcaacatcggctctttctgggtcttgagcctgcaggccctcacactggatctacactatcagctctcctgggtctcaagactgcccactgcagatcttgggatctggcagtctccataattgtatgagccaatttctttctttctttcctttttttttttttttgacatggttttgctctgttgcccagactagaatgcagtgatgcgttcatggttcactgcagcctcgacttcctgggctcaagtgatcctcacaccttagtctcccaaggacctgggactaaaagcatgcaccactatgcctggttaacttttaatttttttgtagagacagggtctcactatgttgccaaggctgccaatttcttataataagtctcattctctttatagctacatcctattcgttctgtttctctggagaatcctgactaacacatgcctcgtgggtccatgcctcagagagtgagattagatggtagtcattcttagccaataacaggggaaactgtaaccagagggatgggataactggtgcagggagagaacttttagatgtgtcaagattccaaatcaggtacatgttcaggggagaatgagggaaaagtacagactgatttagaactatgaaggtgttcataccattgctgggggaggttgtattttattattattattttaattttttaatttttttttgtagagacagggtcttgctgtgttgctcaggttgatttcaaactcctggcctcaagtgattctcctgcctcagattcccaaagtgctgggattacaggcatgagccgccatagctggcctctgtgtattttaaagcctgtactccacaactagctgctgtggtttgaatgtgtcccccaaagctcatgtgttggaaacttaatcctcaatgcaacagtgttgggaggtggagcctaataggaggtgattaggtcatgaggactctgccctcctgaatggattcatgccttatcataggagtgggttagttatcatggaggtgggttcctgatataaggataagtttgctccttccttctctctatcttgcatgctcacttgtctttccaccttctgccatgggatgatgcagcatgaaggccct

SEQ ID NO: 2062 - DNA, 300 bp, Homo sapiens
  misc_feature (1)..(300): DMR14:76154301
ctttttctttttcttttctttctttctttttttcctaaacttccttttggcagatgtggcctcatggatgagctggtacacgacttagcctcagccttggagcagacatctgagcagaataagcttggtgaactgtgggaggagatggcgctgagcccccgacagcagaggcggcagcttcggaaacgccgaggtcggaagcgtcgttctgacttcactcacctggcagagcatacctgctgctacagcgaggcctctgagtcaagtctggatgaggccactaaggactgtcgagaagtg

SEQ ID NO: 2063 - DNA, 1800 bp, Homo sapiens
  misc_feature (1)..(1800): DMR14:77995301
tcagggctgtaatcttagcactttgggaggctgaggtgggtggatcacttgagatcaggagttcgagaccagcctggccaacatgttgaaactctgtctctaccaaaagtataaaaattaaccaggtgtggtggcacatgcctgtagtcccagctatttgggaggctgagtcaggagaaccgcttgaacccaggaggtggaggttgcagtgagccaagatcacgccactgcactccaacctgggtgacagagtgagactccgtctccaaaaaaaaggactttgcagagaaactagaaaaactttcgagcctttgtccagaaggccctctgactatctcatttaatgctctaatcacagctacaacataggtacctatttcacttacgaataattagggcaaggaggaacaaacttaccagttcacggtggctttaataaacaggggtggctgggcatggtggctcacacctgtaatcccagctctttgagaggcagaggcaggtggatcacttgagctcaggagttcgagaccagcctgggcaacatggtgaaattctgtctgtaccaaaaatataaaaagtagccgggtatggtggcgcatgtctgtggtcccagctactcgggaggctgaggtgggaggattgcttgagcctgggaggcggaggttgcagtgagccgagattgtgccactgcactccagcctgggtgacaaagtgaaacccccatctcaaaagaaaaaaaaaaagtgagatgatgaatatgttaatcaccttgattcaatcatgccacaatgtataaatatatcaaaatagcacattgtatctcataaatgtacacaactatgatttgtacattaaaaataataattcaaaatataaagactagtgctcctcatgctagtgcttccttgtcgcattcttccctcacctctgctcccggcactcagtgtctgttctccatcacaatagttttgtgttttcaagaatgtcatataaatggaatcatattatatgtaaccttttgagactctcttctttcactcagcataatgcctttaagagtcattcaaattgtgtgtatgaataatttgttcatttttattgctgagtggtattccattgcacggctgtaccacagcttgtttatccattcaaggacagttaaatgttttccagttttgggcaattatgaataaagcttctatacacatttgtattcaggtttttatgtgaacataagttttcatttctctgaggcaaataaatgggatttgcaagatcatatggtaagtgtcgatttaaatttataagaaactgccaaactgttttccagagtggccacaccattttgcatttccaattgcaaggtgtgaaagttccggttactccaaatttccatcagcccttgggatttttgatacacacactacttgctgaaaagactgtcctttctccattgcatagcttttgcacttttgttaaaaatcagtacttttagattttatcttagtcattctaataggtatgtagtggtatattaccaagactttaattcgtatttccctaagggtgaatgatgctgaacatgttttgtgtgtgcgcttattcacattcatatatcctctttggtgaaatgtttgtcctagtcttttttccatttaaaaattgtgttgttttcttattgttgagtttgataattctttatatattctggatataagtcatttgttaaatatgtaattccaaaatattttctcccagtctatagcttgtcttttcattctcctaacagtgtctttt

SEQ ID NO: 2064 - DNA, 200 bp, Homo sapiens
  misc_feature (1)..(200): DMR14:78119601
gtttgacctattcagaccactcagcattttccatatcagcggtaaggctgtttcgctttcttattcatgtgttcactggagtagcacctttgatttccttcaagaactttccctttgcattcacaacttggctaactgtggtgcaagaggcctggcttttggcctatcttggcccttgacatgccttcctcactaagctt

SEQ ID NO: 2065 - DNA, 900 bp, Homo sapiens
  misc_feature (1)..(900): DMR14:79279101
gcagtgtcggtctgtcggtgtcacacacgcgcgcacacacggcggggcgggagccgcgcgagcgagaggagggcgggcggcgtgtgctggaggctcgcgcgggtgtatacgagcctgtgcttgaatgggaagggccgggattccgggtcgctctggcccctccttcctccggagccagccagtccctcggcagagcgctggggctgcactgatttgctctcgggagtgcgctatttgcatatgacttgcccatttgtgaatttggctccccaactcctcgcttcacttcacctgtgcctccctggtccgcgcacttcgcaggcgcccgcccgcctctcggccacctctgcagcctgccaggcacctcctcttgcgctctcgctgatttcgcccacccacctccctccaccccgtgccacgttggtttgggtggctgctccgcaccgggttcctcctcctctcctctttccctccagtccttcttattctcttcctctggctgcggtggctgctgctgctgctggttttcatccagttgggaaacccaggaagccggcggctgctccgtggcgctagtccagcacgcccagggttaaaagcctcgcgcccttccgcggagactcccaggaacacccgaagaactcttccacctgcagcccccttttgcctggcagttctgcattgcatctcatggaagtggaaacaggaaaataaaaatgttcaaactccttggatgttgggataaactcacctgaacccacttgggttcgggctgcctccttctcttccttcattgccacctttcctctgtgtggctcccgggagtgtgcggttaagtcatcagactcgaagtgcctagagatccggaggaagccgcgccggtcttcccctgacatgcgt

SEQ ID NO: 2066 - DNA, 600 bp, Homo sapiens
  misc_feature (1)..(600): DMR14:81679101
agctcagctagacacagagtgctgattggtgcacagagtgctgattggtgcatttacaaaccttgagctagacacagggtgctgattggtgcatttacaaaccctgagctagactgggactgggcgctgcggagcagggggcggtgctccttggggaggctcaggctgtgcaggagcccacagtgggggagagggggaggctcaggcatggcgggctgcaggtccccagccctgccctgcggggaggcagctaaggccgggggagaaatccagcacagcacccatgagccagcactgctgggggacccggcgcaccctccgcagctgctggcccaggtgctaagcccccggccgctcggagtgtggggcctgccaagcccacgcccacgcccacgcagaaccctaactggcctccaagcgccccacgaagccccggttcccgcccgtgcctctccctccccacctccctgcaggctgagggagccggctctggcctcagccatcccaggaaggggcttccacagtgcagcggcgggctgaagggctcctcaagcgcggccagagtgggcgccaaggctgaggaggtgccaagagcgagtg

SEQ ID NO: 2067 - DNA, 1600 bp, Homo sapiens
  misc_feature (1)..(1600): DMR14:82643901
attttattctgcttttatttgtattcatttctctattttttattctttagttggttatttttggtaatgcttggagtatgctgcttaacttatttacattcttttaagcttattggtacgtgaatttaagactaaattttctttttggccatgtttattctttccatatattctgatttataatgtcttttattattgtcattttatccatattgggcactattggtttttatttttatttgaatccagtgattctggtgattgattttttgtaatgaaagtattaaaataccagttgataacatcttagatattttctttttgatttttgtttccagctctgttaataatttctaattttgctccattgtaaacagagaatactggccatgcaattacttcatttttttgtcatttattaaatattcatttctaattgtagtactattcctttcaaactttctcctcaaataaaacagtttaacaatgaagcatgccaatctaaagtgaagaactgcatgccttaaaaagtgagacctttggttgaaacactgctaaagcaatcatgagaaaaatctgcaccagctacttctgtcaaaccagctgcagcaattgggcacaaaaagagagtgaaaatggcttggctctcactaagcagttacagggtgtcatttaaagaacatcgaattcacaaccacacaaagaccttcctggaagtgaaggtcatcatctttctagagatgtgacttgattttgatttccaggtttctgttgtgtgggttgttgtttggttgtttgttcttttttttttttttctatttaagaagcacttcacttctcaagcatgacactgcagggcagagcttgatttcccaagatcagaaaatatttattgtttccttgtcattctgtcaacattgttttattacttgtcttagtttgaagagaaaagaagaaataaacaagaatcatgcgatgatacctaaaagtatgatccttttttatcatctgcctaagtgtaatggtctcagataatgttttcatcacatagtgaatcttaactaaaactctggcatcaggctctcctgcttctcagtcccacaacataatacagtttccaaatgtaccaaggatgatacataacacaataaaaagagctcaaccaaaatttgaaatgctgctttttacaaatggtctttaataccacattcacacacacacacacacacacacacacacacacacacattccatagtaacattcacttagaatcatccttagtccatactagagttttctgggttacaaggaacctagaatgagctgggataatagaattggatcttcctaaaggagacttgagcattaatgctgttactgagaaataaggtaaacttcaaaatcctggttcactgacattctccttggttggcacccttttcaccttcatgttaaattggagcagccaacttcttaccatgtattgctaaagttcattcaaatgaggacagaaaaaaagatcaatactatttaatttgtaaaaaattcaaagactgaagacaatttgttttccaaagtcgagactagtttgtctccaag

SEQ ID NO: 2068 - DNA, 400 bp, Homo sapiens
  misc_feature (1)..(400): DMR14:82792701
atttgtatttatttgtatggtgtggtgatatttttcctggaatactgagttacattcattcactaattctttatttcaacaccaaatatatatttaatattcatttatatgcttgctgctacacatagggtggttaccaagacaaaaggaagcttcagaccttctgaactgatagcagctgtttgggcaacacagtttagcaccctgtagaatttgtgaaacacaggttctgtcccttcacacatatttagtaccgaatctaacctagtttttctcctgccagtctctattatacacttagaagtataaggcagaagccatatcttcatttgatttagaataaaagacgaaagaagagaaatcaggaacatgtccttgtaaatataacaggatttgaagt

SEQ ID NO: 2069 - DNA, 800 bp, Homo sapiens
  misc_feature (1)..(800): DMR14:84833301
gtgggccctgctgcaaattaggtatgaaaaacttcctagtattcgtgagttgtttgtcatggagaattcttactaataatagaaaattacattccccaacaataggaagaaagtcgctactaaccgtagaaaataaaaatgaatccaaggtaagttacattatgttgaaagtttagagatactttcatgtatctcttaacctactgcgttagtccattgttgcattgctacaaagaaataccttggtaatttacaaataaagaggtttaattagctcatgtttctgctggctgtatgggaagcatagtggcttctgcttctgggcaggcctcaggaagcttccaatcatggtggaaggcaaaggaagagcaggcaattcacaatgtggaaagcaggagcaagagagagagggaggggggaggttctacacactcttaaacaaccagatctcgtgagaactcactgtcgagggatgatgctaaatcattcccgagaaactacccccaccccccgccgattcaattacctcccaccaggccctacctccaacattgaggattagcattctacgtgaaatttgggtggggagacagatataaaccacattacctaccatggtaatgtgggttatgcattgattctaggtagccataacctttgggacatggaaagttttgcaaaattgctatctgcaatagacacccacagcttagatgggaagggataaccccacctgatgcaaacttccctgttagagcattcagcaatcgcacttggttcttggtaccatgccagcatat

SEQ ID NO: 2070 - DNA, 200 bp, Homo sapiens
  misc_feature (1)..(200): DMR14:86173401
taggggaggaagtatttgaaaaaactattactgggattttaacattattaaataaagaagaaaatccttagaaaacgtgtggagagaaaaatataatagaaaaggaaatgcatacctagatataatatagttaaatacgtttatcggaacagaagaaaaatagagttgctggaaattagacacagatttcttacaaagaa

SEQ ID NO: 2071 - DNA, 200 bp, Homo sapiens
  misc_feature (1)..(200): DMR14:86965601
atttggaatggctgtatttacccatacctgaacccccatcgtatctaggaagtaactaacttgcttttgattttataggcttataggcagaagggacttgccttgtctcagatgagattttggactgcagacttttgagttaatgttaaaatgagttaatgttgcgggaagtcagggaccccgaacggagggactgtctg

SEQ ID NO: 2072 - DNA, 200 bp, Homo sapiens
  misc_feature (1)..(200): DMR14:90039601
agggggttggagaaaagaccttattacctggctaaacaggattttgtacgtcacttggatttatctgattattaaaaaaaaaaaaaagaaactgttaagacctacatagtacatagggtgacaatccttatcctctgtgagttgagggaggtgagtaatctcaaaagcagctagcattcattaagtacttttgtgtacta

SEQ ID NO: 2073 - DNA, 700 bp, Homo sapiens
  misc_feature (1)..(700): DMR14:90491801
caagacccagccctgcccccatagaatctaggatgggagcttcggcatatctggtgctgggggctcccagagaatatctagccagtcccattttacggatggggcactgggccagagaggatcggtggcttgtccaaagctgcacagaccccctggggtctccctcctgggctcagctgtgatcaggtgggcacggagcacccggaaacatcgcagacaggggactagccacatggcagaccagtcccagaaagcaggccagctgctggagccagggagatgcagaagacaaagggactccaggaagctggacactgccttcctcttctctcccagacacagtggtgggtgggtgcgaaggagtgaatgcttgtgtccctctacaattcacatgcagaagccccaggcactagtgtgatggtatttggggtggggcctttgggggtgattagggcatgagggaggagccctcacagtggaattagtgctgttgtgagaagagacaggagagatgatccctctaccacgcgagggtgcctgcaaccagggagaaggccctccgcagcccgaccatgctggtactctgatcttgcagactttagagctgcaataaatccatacttattgtcgaagctgccttgtgcacagtaatgagttacagcgtcctgagctgactcagacagtcaatttgtgggggtgc

SEQ ID NO: 2074 - DNA, 300 bp, Homo sapiens
  misc_feature (1)..(300): DMR14:91333101
tgttcatatttccatttggatgacagccactgacgtatgtgcatctcttttggctgtactataggaatacattaagtaattcaatggaaccttcttgctaatattttaatggtatagatctgctaatgaattctcttcgaaacatatacttactgtaccctgttgctttatgccttattttaaaccgagccttaagggaatatagtattttaacattaactctgccaacaactttatctagcagcctgttaccattttcgtcgtctgtgaaatttatgtccaaagaaaggcaggattaca

SEQ ID NO: 2075 - DNA, 1100 bp, Homo sapiens
  misc_feature (1)..(1100): DMR14:91888901
tgagagattttctatcctcttcccaagtccatgtaaacctcttaggcctctgaaaagagatgtcagtgttttcagagctaaaagccttcacggtgagcagactgagaggcttttcttacaggggaggctaatcccatggccacaaagttcctgcctcctagcatctctggagctctcagggagaaaacaaataaatgaacagctgtagagagagggtctagcaagacactggcccccaccagtgcccgtgggaggttggggtttccccaccggggacaggagggggtaggaaaatgtccactgtgctaagccactgagtgcaagttcagacaggacagtgccggcaagtgttagggctggtggcctcagcctctggccaggcgctggccactcggaggtgaatgaactcattccaccccctcaccgctctcagctgcttctgaagagcagggcgaccaaaatgattctgcccccctggggttctcactgccctttcctgccagccctttccaaatgcccttctgaatctgctgagggcacacagggccccactccaacctgttggacaagaagtctgggcccctggttttactctcagatctgctaccacgtggctgtgtgactttggccaagttgcttaacctttttgagcctttatttcctcagtgaagcagagccacaaacacctgcctgctgacctcaagaggctatttattatttgggttcagtgagatgaacagacgtgacaatgctctagcgtgtacagcactcttccacacacgaagagtcaggattgcaaaagctcaccggagtatgcgacgccctgtgctgcccatgggccctgctgatgcagcatcccagtggctgagtgcccatacccaggcctgggtgccgggcctgctgctttattatgctgtggacttggcactgccaggtgtattatctgctctttgtcacacacctgtccctcagaggcctgaaagacgcaggcaccttttggcttgggcatggctatgcctcaggaggtactgggggcacggtgccagcctgtggctggcacctccaatcccaggccttggcacagagaagcctgcatctgc

SEQ ID NO: 2076 - DNA, 1400 bp, Homo sapiens
  misc_feature (1)..(1400): DMR14:92367901
gaggcaacgtggagaaacagaagcacttggagaattgtcaaagcatattttttaaaaagttaaacacaattcttatacaaatagtgagcatgtgtcaaaggcttatttaactcattaatgagggaagcagcaggatgacaaagctggttctaggaaagatacgggaagcagacatatcttattagtgaaaaaatgttggagtgagattcctacgtttgatacaaaatcgctaagatcctcacatcctagggcaatgaaaccataacctttgggattatcttttatccctccagacagaaacaatgggcaattcattaatttccaacaagttaatgcctgaatttacacagtctgagtcactatcaggaaaaaatcatcacagctacgttcccaggaaagcttcatgacccttcactgggtttataagacgggggctccagtatgacgttgaaaggataggagacatccatctgcctcatttaggagatttggataattttttttttcctatcagtctttggagacatctggaaggagggttccctctgaatttcctatagtaaatgggattggggccctagctgttatttaaacatcgaagaacacaggctcactgctgaaggtaatggattgaaattcaccctcatcttcattccttctcagaagcccattacaggaacagtgaaaggatttttttggaaagctaaaatccagaaagacaaggaagataaaatatcaagaattttggaagctggaaagcagaagtatgggcagtaagtcacccggagacagctgctgcaggggctctgagggtggggcagggggagccaaaaacaggagggctggtagaacgtcgaggttgaggtctccttcccctcgtctaggcagcacaaccagaataccctgcctcacccaactttggcagaaaaagagggtttaccctggagagaaggaaactgagggtctgtggaagaggggattaacggcaagtgcacccattccagctccctccccctgctcagctccctacccactcctaaggcagaagagctggcagccagtactggacccatatacaaggagaccagaatgttcttctctagggagccccatcatcctgagggaggactctaaagaccctgcctccagaggtgccccctgaaacagcctgatcaccccacaatgaggccgtcagccctaggcccacccacatgcccacagtgcccaggcagctcttcctgcctcttatttgaaaccaagtggtcaaaactccccaggcagacaggcagacgtcccaggaaaggtctgacttggtgagtacaagacaatctgaaggaaagcaactgggaggcaactgactgtacagggagggaggtgaaatgtagggggcagtcatgatt

SEQ ID NO: 2077 - DNA, 1600 bp, Homo sapiens
  misc_feature (1)..(1600): DMR14:93346101
tccaaggactgaggaactttatcacctacaaacccttcctgaaagaacagcttaaggatgtactacagcaaaacgaaaagaaatctaagaaagaggaagataccaggctgcaggaacagaggaatccagagaaaccctagagtgttactcgtgcaataggcccccaaaagaaataatgtgaagacacaggatcattgtagtggataaagttttattacagtactaaatttaaaaatcacagtatatttacttttccctcaagagggtctgggcacagtgcctcatgcctgtaatcccagtactttgggaggctgagacaagaggatggcttgagcccaggagtttgagatcagcctgggtgacacagtgagacctgtctctacaaaaaaataagaaaattagccgtagtgacagataattacatcactgtttctactgggtccaaacactctatttgaccctgccatgaatattttttatatcatcagccgactatagaaacttgttcttggttttcagtgttaagaattaacctatagacattttatggaagatttaatttgcattagaaacagtgtgctataaactctgccaatgccagggcatgttaagaggtatataaagtataggtagagaggaagacaaaggaaaggagtaggggtgccaagtccctcaccttaccctgcagaaaagagatacttagtgtgaggtggggttggggctcaggggagggtggcaggagagtttaggagaggataggacacgtgggtggaaagtgaggtgaatgagggctgggaggttgcagggagccctgagtggaaaaggcggggcagagcagggggtactgaactgaagagagtggagcagagcaggggtgtgctgggtggaaggggtggtgcagagcaagtggtgctaagcagagggggtggggcaaagcacggactgctgagtggaaagggcagtacagagaaaggagtggtgagcggaagaggcggggcagagcaggaggtgctgggcagaaggggtggggtagggggcgagggcagagcgccccctcgtggctggggcgcctgcgcaaaccagctgcctcacgagcactggagcttgcgttacttggcctcacctcacctgtgctgtccacgcctggctttgtctcacctgacgcgatatgcctctcctgcgtgggcgctgtcctgcccgccgccactaccgccgcttggccctgctcggcctgcagcccgctccccgcttcgcccactcggggcccccgcgccagcggcccctgtctgccgcggtgagttgaggcccagccatcatggtgggcgggaagcgcgtggccctggcggggcgccccgacgggtggggagaagggaggacacggcgtgcaggcctcgcgtgggaggctcttgtggcttggtcgccgttgggggaggttcctgtggcttggtcgcctttgggggaggttcctgggagagggtcgcggtgaggatgccgtcgtcgggcacaggggcggaaagcccgggaccctgaggaacgcgcggggattgggcctccttcgttgttaccctttaccggcacctggctcgggggcggggctgtg

SEQ ID NO: 2078 - DNA, 200 bp, Homo sapiens
  misc_feature (1)..(200): DMR14:93379001
ctatgagaaagtagcaaagtctggatcaggaggagcaaaagagtataagagagtcaagttaacagctgagcaaaagagtggggattcatgaatttccactgctgtgattgatctctgctttaaatctgcaactacttccagctcacacctgtacttgggcttctgtttgtgaatatctatgatattcctcttattactcc

SEQ ID NO: 2079 - DNA, 400 bp, Homo sapiens
  misc_feature (1)..(400): DMR14:93668801
accactgcactacagcctgggtgacagagtgagactctgtgtccttcacaaaaaaaaaaaaaaaaattatcctctagtcctagctatttgcggggctgaggtgggaaaatcacctgagtctgggggtttgtggctacagtgagctttcagcctgggcaacagagtgagaacattgtctaaaaaaaaaaaaaaaaaaaaaaaagaatatgcaagaactttatggagataactggaacattttactggagagcattacacaatgttaaataaatggaaagagattttatgttcatggatgaagacccagagtagtaaaaacaggtaattctcacagaacaacctataggtttagtataatgacaattaaaatcctggattttctcttctggtggtggtaaac

SEQ ID NO: 2080 - DNA, 400 bp, Homo sapiens
  misc_feature (1)..(400): DMR14:94610001
acttaaacatatgtattggccaggtacagtggctcacacctgtaattccagcactttgggaggctgaggtgggaggatcccttgaggccaggatttcaagactagcctggacaacacaatgaaaccctgcctctacaaaaaaataaaaatttaaaaattagccaggcatggcgttgtgcacctatggttccagctactcagaaggctgaggcggcaggatatcttgagtcgaggcggcaggatatcttgagtccaggagtcagagtcttcagtaagcaacgagcaatgattgcgccactacattccagcctgggtgacaaagcgagtctctctctctctctctctctctctctctctatatatatatatatatatatataatatatatataaaaatatat

SEQ ID NO: 2081 - DNA, 800 bp, Homo sapiens
  misc_feature (1)..(800): DMR14:95175001
tctaagatatgttttctaagttgaccaaaagtgtaagtgcccaaatctgataaagttctgttgaaactgttacattcgtagtaatgataattgctagtcttttggaaatcaacttggtaggaaaaataaaaataatccttcttttgaactgctgtgcttttgttaagaaataatctaaaaggaaaaagtcaaattcatgaggtcatttgttacagcattttttatcgtaaaatattcaaacaaccgaaataataaaatattaagtgactaagtaaaatatgatattagaattatttgtcatcctgtagccattagaatatgtatgcaatcaatttagaggtagggaaaaatgctcatgagtgagggggggctggaccaaactcagaatataatcttgtatgtattctctgttaggctttctaaaaattatacatagataaaacaaggattgaattaaatggaaaaattaaaattgtatatatatgttaagtgattactagtgaaatttttttttattatactttaagttttagggtacatgtgcacaacgtgcgggtttgttacatgtgtatacatgtgccatgttggtgtgatgcacccattaactcgtcatttacattaggtatttctcctaatgctatccctccccactcccccaaccccacaacaggccccagtgtgtgatgttccccaccctgtgtccaagtgttctcattgttcaattcccacctatgagtgaaaacatgtggtgtttggttttctgtccttgcgatagtttgctgagaatgatgatttctagt

SEQ ID NO: 2082 - DNA, 200 bp, Homo sapiens
  misc_feature (1)..(200): DMR14:95653401
tgttaatgatctcactctatcgtccaggctggagtgcagtggtgcaatcatggattactgcagcctctacctccctgggctcacatgatcctcccttctcagcctcccaagtagctgagactacacacatgcgccaccatgcctggttaattttaaaactttttgtatagatggaggtcttactgtgttgcccaggctgg

SEQ ID NO: 2083 - DNA, 600 bp, Homo sapiens
  misc_feature (1)..(600): DMR14:98556001
ctcaaacactgtgacaatcaacatgggacacctatattttcaaactctctggcttagaccatcaagttcaataaagcaaattaaaaaaaaaatactatgccatgtgtccctcagggaaacccagtgagatgggcaacgctggtatccttatttccatttatcagatgaagaaactgaggcctggagggctggctgaaagaggcaggacatgattctaatcaaggtcttctgagatagggtccgttgctccttccaccatacctgggtttcccacatgtgatgtcgggtgactcatcgatcagcctcaaacaacaatgatgacacagggacaaggtgccacttttcacttctcctccatctttgcattgtacaaacagccctcattcagtgctaacttgtcttcaatctacctcttgcactgtcaacctcccctgctgatatggagcaaacctcaaacttttatttgcattgcctttattcctgcaattaccttccttttaggcattccttttgaaataaatatacctatgtaaaaacaaaggcttaatgagtataaaataattgtagccatactatgacaaaggcccatacagcagtacc

SEQ ID NO: 2084 - DNA, 1700 bp, Homo sapiens
  misc_feature (1)..(1700): DMR14:100595501
ctcattcctttctattgttgagtaattctccaccaaatgaatatgctataatttgtttaaccattattctactaatggatatcagggattttccagttttgggttgttataaacagattctctgaacatttgtttacaagtctttgtgttaagacatagtgctttaatttctcttgggtaaatacctcagagtggaatggttgagttgtacgggagatggtgggtctaacttgataagaaaccgccagactgtttgcaaagtgatcgcaccattttatattccaccagcagagtatgagagattcagtcactccacatctttgctgacacttggtatggtgcatcttgttaattttagccattctaataggtgtgtagtgacagcttgctgtggttttaattctaattttcttaatgacagatgatgctaaaaacctactttagtgaactgtctgttcaaatcttttgcctgtttcttccttttttttttctgagacagaggaaaaaaaaaagaaaagaaaaaagaaacgttctcaacctgataaaggacatctaagagaagtttaacagtttagtagtacattacacttcatagtaatggacccagagcttgctttctaagatagggaataaggcaaggatgtctgttttcactgctgcttgccgttcaatatcgcactggaggtctcagatacgcagtaaggcaagaaaataaaacaaaataagatgaaaatctgtcgcctaggctggagtacagtggtgcgatctcggctcactgcaacctccgcctcccgggttcaagctattctccctgcctcagcctcctgagtagctgagattacaggcgcccaccaccacacccgtctaatttttgtacttttattagagatgggtttcaccatgttggcaaggctggtctcaaactcctgacctcaggtgatccacccacctgggcctcccaaactgctgagattacaggcctgagccaccacacccagcctgcccatttcttaattggattgtttgtgttactgttatccagttgtaagtgttcttcgtctattctggatataagttatttgtcagataaatgtttgataacctacaggtcacatttggcaggcttctaaattaactgccagggaagttcttaacgattcaccgcttacactctgttcctgagtgaagaattttaacttgagtccttccaactgttgacgtaccaattaatacgtaagccactggcactaataaggacactgatttgtttctgaatcatgaagttttactgattgtcttgtacatagaacatgttagtctatatgttgtcacctgtagccaatgattgtaacctctgtattaatatacccaccaacggaaaaggacaactccggccaggcacgatggctcacaactgtaatcccagcactttggaaagccaaggcaggcagatcgcttgagcccaggagttcaagaccagtctgagcaatatggcgaaaccctgtctctaaaaaaaaaaaaaaaatacaaaaattagctaagcgtgatggcgcacgcctatagtcccagctactcagaaggctgaggtgggaggatcccttgagcctgggaggcgaaggttgcaatgagctgagatcgcgccactgcactccagcctgagcaacagagtgagactctgtctcagaaaaaacaaaaaagag

SEQ ID NO: 2085 - DNA, 200 bp, Homo sapiens
  misc_feature (1)..(200): DMR14:101546201
tcccttccataatcccacggctgccccactcctgccatcacctcattaatccaactgtgggaacagggagaagaagcgggggaaggcacctctcttccccctaaggtcaggaacccgaagtttcacaggtcacttcttctgcgtcattggcaaggatttggtcagataactacgtgtagctgcaagggaggctaagaact

SEQ ID NO: 2086 - DNA, 600 bp, Homo sapiens
  misc_feature (1)..(600): DMR14:102691101
tggcgaaatacacgaacagtccgacaagtccctgcccaagtgtagcttacagtctacgggaagctgcactggtaaataagttcattgagcgccgtgaaggagaagtgtgcttaaacaaataccacatattctcacttacaagtgggagctaaacattgggtgcacatggccataaagatgggaccaataaataagacactggggactacctaggatggggagaggtggggacaagggcttaaaaagaacctgtgctgagtgagtcatgggttcatttgtaccccagacctcagcatcacgcagtgtgtctttgtaacaaacctgcacacgtgcccccgattctaaaataaaaagttgagggaaaaaaacaaaacaaaacaacttattctttgacttgggtgtgagcagcagtagcgatagggtaagcctatattggcctagttttcagctttttaaaaatatatggctagaagaggttgaaacttgtgattaaaatgagtcttttgagtgtgtgaaaagtattttcatcactttaatttttttaagtgctctagaactagctaaaatgggcaaaacgtactagaataaacatagctgaat

SEQ ID NO: 2087 - DNA, 400 bp, Homo sapiens
  misc_feature (1)..(400): DMR14:103482601
tatgtgactgtctgaggtgcagagtcagtctcctcaagggtgttaagactaagatctgctctctgcttccatcctgtgctacacgtatcatacaccaggcacatgcatatatgcctgtgtcttctgattctcttttcctaaaatttttcgtttcactctttggaaataatatttaagacttctttaatttctttggcaatatttcctttctgcattccccctggagacacctgccttgttggggccaactctttcatatcctgacctgtctcgttgcttctcttagcatcagtcattgaaatactttgcttctgaaggtgtcgtctttctctttagtcaaagagagtctcaccgccaaaccttaaaagacagggcccattgttttaataatatttggact

SEQ ID NO: 2088 - DNA, 1500 bp, Homo sapiens
  misc_feature (1)..(1500): DMR14:104364101
acccctcacagactgccgggtggggctgggggccggggacaccaggagccgcccactgacctgtgtgtctgccctgtggctccgtctgtcctggggtgcctttctttcctccctgtcaggccacacacatgaggagccagctcccatgcagagggccccctcatcgccccacatggacacacctactttccattgtcacctgtcagcatgtccgggctgtgctccagtcctgactgtggccctgatccctctgggactgatccaacccctcccccttctgcaccaactacaggaagaagggcttccactaggccagcacccagggctcctcaggcccccactctgagccaccgtgtagcgtgggctctgagggagcagggtcagtgggagccggcagggacagagtggccctaggatgtgctctgccgagagaggggaattgagtcactgcgtggggtcttccatggtgccctggagggcacttggaggaagctaactagaacaaactgggcactgtccacgtcgctgggctcagcaggggtcacccttcccagggtggggactatgaggtcttcactcaactgtgatgccacaccagattatcttgctatccagcatgtcctcagtctgaactgtgctctgaccagacaatcacaccaagacccaactcccccacacaatgcgactgagatctgtgtttttggagatgattgcctgatttctcccaaaaagggttttaacttttcatagacagggggattctaggagcctcatgactttccctaattttccctccacctccaacacgtacctgcccacctcgtccaagccccgggcttgacaggtgtcccctctgagaacattactgcactgactttgtccccgagggtgaggtgaaccgctggggactgatgccagggactggggagtggccgtgccctgaaggaaggtcaaggcacaggagtcatgtaacgcaccttctccaaccacagcacaaccatgtgaggactgatgacaagaacggagtggaaaatacccggccatctgggaattacaaaaacaacccatcagccaaacaagaaaccataatggaaaccgatatttggaactgaatgatgaaaaagtacttcacagtaaaacttgtaggatccacctaaaattgcatggaaggataattctatggatttaaatggttatattagaaaagaaggatgtctgaaaagtaatgagccgaacatccagctcaataaactagaaaaaggggaacaaagaaagaaggaaataaaaaaataagagcagaaattaatgaaatggaaaacaatatacaaaacaaaggaataactaacgccagaagcttgatctttgaaaggacatcagttttagtgatctgtttcattgcagtgaccgcagttaataataatgcattttatgtttttaaattcttaaaagaatagattttaaatgttttcaccacaaaaaataatgtgttgatgaggtgat

SEQ ID NO: 2089 - DNA, 500 bp, Homo sapiens
  misc_feature (1)..(500): DMR14:104727801
taactgggctccctgccgaggaccacagggctccagcgcgccctggtcagggtttagaatccccgtccttctgctgcagtgctgacctcagggcactgggctgtttatgtctggccatgcccagtacacgggctgaaggggcctgccctgggtctccatagcgcactcccagcctcccgtgccctccaggtctagctagagccagtgtccagccagcagacgggtggaaagctatggccatgtatgcaggggtgtgagatcacagggtgtttctctgtggtgtggcagcgccaggtgggagctggcatcctgtgcattgagggcccctgtgctgtggctgttggggctctgggcaccctttccaaggggccatcaggtaacgctttgccttaggctccagggtgcaccagagaccttctgggagtcagaggggcagctgccttggccagggaatgcctggggttgcttccagaaagaggtcttccccctaccccacctct

SEQ ID NO: 2090 - DNA, 1900 bp, Homo sapiens
  misc_feature (1)..(1900): DMR14:104965601
agggtctcagaactaaggcccccatccctgccccagacccagttgctggtaggacactgattgggaaggagcatgtccctatcctttggggtggtgtgctggcctcggggaccagctgctccctgtcccctgcggtaggtgtcctggccttggggactgtcccacgaagacagatggggaggcccagtcccggcagtggtctaggtctggctgctcctctggccagtgtgctgtgtggccctgagcaagctcatcccctctctgagctttcattccctcatggatatgtggaccaccctgcctgccctgactgtgggttgctgggctacagacactgctcccgcagaggcacccccagggccatgcctgctcatcccaagagcacctctgcctgcgcgggcccctgccactccctcaccgcttcacgggcctttccttgcccttctgcaagatggctcacagcccaggtcccctctggctctgctctcaggcctggcagggctggaggatggtgtctcctggaggaggttctctcaagcgaaggaagagaagggcaggaggtgagggcaggcagggctgggtcagtgccaggaggcatcaacactcacccccacgtcatcccggccccgccaccttcctactgctccgggggccaggcccagacccctggcctccataaccccccagcagagccacaacctccgtttcccccacctgccaaaccagccttgcccacggtgtcagcccaagaattgtacccctggcaaccccacaacacgatctcctccacaggccccttctccctaaccaggcagtgaaggggcaagaccctgtctcccttctgcacagctctgtcctggccacctgggcccatctcactcacctttgcattcagacactgccccaccacctgacagggcccctgctgctcccacctggacgcacccccaacctgcacagacagaacttggccagccccaccgctctgcctcccagatggctgccaaaccctccactccttgcccacctgccccctcccactccctccacgtggccctgccagggctccccagtgcaccccacaaccctgagggaccaccagctggggccaccccagcccctctggagctgcctggagctccagccacaccagacccacaacaaattcgtgggacggggtggtgccaaggaaagggacaggaatctggccagagcctgcccaccgctaagccaagggcaatggcaggtaagccactctctggcctcagtttcccttcctgctctgcccagaccctgccgctcaatccccaaggtgggtaacatatgtgaaaactgaggctgggggaggggagccacttacccaaggggacccagccagtaggtgtggagctggggcaactacctagcagggctgggggcagaggagggtccctgggtcacttggcccacagctgctcccctggcagcaggtgcagctggggtcatgagtggggaggggctccactgcctcggagaccgggtgtcccaggccctgcctagcactcagggtggggcaggtgttctgaggctgcccagaaacccagccgcctccccgtccctccgcagcctccccagccaaaaagccccacccagctggcaggagcctggatgggttgggggtggggggcagctgctgtgaggcccaagaaagggtcaggagggcaactcctcggagaagggactcgccaggcagggaaacacaggtctgctgggctgggggtgggcaccacggtcaagggcccctgagctgggcacagccggctgcactcccaaatctctccagggtagtcttgtgggtgttggggccggtgagggagggtgtcgacagcaagccctgggcacaccctgtgctgggaacctg

SEQ ID NO: 2091 - DNA, 500 bp, Homo sapiens
  misc_feature (1)..(500): DMR14:105158001
ggctccctaccgttggggtgccagaggcccagcctgccctgagctggctcaagtcagcacggagcacaggaagagcgaccggggggagaggtgggcaaagggcagcctggctggagtggccacagacaggggccccatgggcagccgggacccgagcgtttcctgtggaacgccccttggtgcctcactgggggtgaccacgggggagaacgtggggccccatcaccacgctggcggcctccaccaagtgcacggggtggccaagtacagggcgcccagccagaggccccaacaggccggagctcaggtcctgcaggcatacagcacacaggcaaacccacacctacctccaccctcacacagaacaggtggcaggaggggcccttgcggtacagttggggaaactgaggccaagaggtcctgggactgcccagcacagcctcagaccatggccactatgccccctctgcccccgggccacctggcccttgtaccccagc

SEQ ID NO: 2092 - DNA, 5200 bp, Homo sapiens
  misc_feature (1)..(5200): DMR14:105197401
ggctgcgtttccttcgcattgttttggacagaatgacagccagggagggctggccacgtggctgcagcatctcctggctttctgcagggttcggtcacttgctgtccccaggggcagcctgggcctcatgcctgtgtatgcggcaaggggacatggggtggggggggtctgctccaaggaacatcctccccagctgggcctcagggcagggccatcgggagggagaggccacattcctgcccaccccccacccccctggactctgcaggactgtccgacagcctccgagtcctcgagggccatgtttccggaagactctccttgaagactctacctcctcccgaggcctggggcagctctgtgttggcagagactgaacctaggaccagtgaagaggcggctccctgtcccccatccccaggcctgagcacccagggagatcaggagtcagcgctgtgctggctccagagggctcaggggcaccacgttcccactcgaatctgggaaggctttgtgtgggcaggtgcagagctgtcattagggcaagggccgggaggggttggggtgtctcagcgttttcccgcagcagcctggcacctggctgccccaggattagataatcacacaggaggggtgtggcactgggaggggtcaggggctgggggctgaaggaggagcaagaactcaaggtttggggaaactgaggcagcccctctcttctgggcaggatgagatagcccaggcccactttggtcttggcaagccccagacagacgtccagcccatggcacttcttgccatcatctctaccagccacagacccctccctcagcaagccactggccaggacagggatgacacaaggtgagcagagtcaggacaaagagacacttgccagctgcagaggtcccagagcaggttctggcccagccatgggggtgagggtggcaaggaaggcttcttggaggtggcacttgggttgagtttgccaagggaggaggtgacagaggaaaggcgtgacaggcagggacagcggggcatagaccccagtcaggggaaagccgggtgctgacagggagggcaaggagtcccaggggcacaggtggggacagcaggagctgaggccatgctggaccagggacaggagcaaggctctggagtggcaacctggaggcggtggcaagccatggcagggcaggtggatagtggtgactgcttatttgctggggtccccaggagtcaggtcaggtgggggtaccagggagagggtgctggggctgtgaccagagctctagggaagctcccctatgcaggtcctacaggaccaccttggcagcggtggtgctgagcatgatcaccctgggcccctgctggtgggctggggtggtgaccacagtatgccagaaatgctggggtgctgcaggctgccttctggctcaggggctctgagcatcgttgcccaaccagggccccgccatccaaggagccagccccagagtgccctaccatgtgctgtgagcacccccctctcctgggtacccctgaaccctctccgaagcctggtcaagtggatacctgcctgccacaccctcctccacctcactggcctggccctggttgtggccctgctgggaccaccgtctccactccaccctgatccatagcccttctgtagcctccttcctgtgtgagcagaagcttcctgggtctccctgcacccactgggacagatcctgcacgcccccggtgctcagccacgcaggtcatggcgtttgtgcattctgttttctgagccatccagcccaggcggtggacaccggcgtccagccccagctctcaggccacaggaagtgggaggtccagcggcttccattcctgccctcgatcagcccttgctgcttcctgcggccaggcccccgctggcgccgggcggcctggtgagcagtgactcatccagagcccagcacccgaacatcccactcccggctctcagcagaggaccccgtccccacctcaccccaccatctggcctgggctgcaggactgccaccgcccagcacacacctcctcctcagtggccctgcacctgctcccacccaccggctgggggtcctccactataaagagcatgacaccccagcctcaggggactccagccccccactctcagaggcccttgctgtccctggctgtggggctctgcccacctctgccctgctctccctacctctgccctgctctccctagagccaccagccctgccgtcacacaccctctgttgcctgagtcctaggttggaaggcctacctacctctacacctgggaccttctgtagcccatttcagccggccagcccctcctctgggaaggcttatgggctcctgagagccctctcagccccgcctcattgaggctgcctctcctgcctccaccccatggaccttgtctttgagcttggtgtgtccccaaggcagaactcaccctccaaccccatcctattgcgaccctcgcccaactcgcctggagacactgcaccggtcaggatgagaatggaagttgggccggaagttgggccgggcagcagagaaagctccgaggaagctcccctgtgcagggtgccccgaccccaaatccaggtggccaccccatttaagtgacaaaggagctagctgcctcagtggactccttccctccctagaggcctcctctcccatcggcgaggctcctgccctcctcatgacactgtcacacacgcccaatacctgcaagagggctgcacccacacaggcactgagggcccctcaggctgccaccccacacagcccacccagctgtcccgcagcgcctcctgatggccagggcccgaggggcctcccccagcttgcagagcctgcgagcatcctgtgcatgggtatgtacagatgcacctgtcccccagtggccatgtgaccaccacacccctccccttggtgggctgggaaatactgtctctgaatagcaacctccccgggagccaggccgggacacaccagcccaagagcgtgcccagggccctccaaggccaccagcaggctgctgagccctgattttcacctcccaggatcacatcatcccaggctcttccagccccaggccctccacacattacaggcccctaaatttggccccacctgaacctactcctttccgctgtccccctcccctaataacaaatccctgctgagaccttcaccagggagccagtctcatctcctcctccacccacctcccggccccacccagggacacccccatcctctgggcccttctccatcccctccccagagtgctccaaaatggaactaagcatgcgctctgctcacagccccacagcccaccctccagcagctggcaagaccacttctcctctgccggccggccgctgcgcctcacgccctgatttccctgcacaaacttgtgcctatggatcttgttggggagggggtggctcgaagcgcatctcccctacaaggacaggggcgctggcctgtgggcagcacttcccggttccctgcttcatcctcgccgactctgcgcacgcacttggctgtcaggctttctccacgcttgctgagtgaatccatgaacaaatgcatgagaaacacgcattttccagaaccccacgtgcagctggagggaatgctccggtcagggatttgtgggaggggaagtccgaaggggtgaggcctggagggtgggctgtgtggggatggcagccactccccatcctccgggcgccgcgggggcagagcacagagacagaagctcgaacatcgtctccatgctgggtacatgtctcccagcatgtgtgttcctggaccccaggcaggcgaggctgtggcctgcaggtgctgaccctagctcagcctcagcccacagtgccgcctccacctgccaggttctgtggcacctgcagtccggccctgcactgccgcccaggacccccacagcggccaactcagctcaatgggtgggtggtcaaggctggagcagagccatgggggccagcccccgaggtgtgctggcggccgggttaggctggggtcattttcccaggctccaccaaggcgggtacctggcagacaacgttattgtccacagggaggcagcaatgactcagtcgggctggtgcagaggcccccggccgcaaaggaaaggagggtccccacatcgtctggcagagtgggcactgcctcccctgggcaggtgtgactgggccttctgcccggcctcctatcccaatctcagtccagctagggcctcctgggcctctgtggtcccagctttgctgttaagtgggtacatgtaacgctccctccctgcctgtcagcgggcctgagctgcgggcacttccccaatcgaggccccccggactgctcaggagtgccccgaccccagctgtggctcctccctgtccagggtgagctggggtgtcagtcctgggggcatcagtgatggaacagagtcgggttgaggtcagggttgggtcccccagcctagcgcccctgacttcacagttccagccgtgctcattgtgtggggacaatggcttcctgagccaggttcctctccgggcaggaaaaccacacagaacctcctctttgcctccgcccacggcccctttgaagggcctgggccagcctcaggcactgactgcagccttggggcctgcccccggcgccacctcttaccagcctagcccaggccccggtctccccagggacctgccagtcctccagacacgtagtacaggctgcagggacagttactgacggcccaggaagccgccggccagaaccatgcaggcagtgggctcaacacagcatcagagcttggaaggacgcagagtcctgggcccggactccgtacaggctggagacggaggcaaccgacccccctcggtgcctcccaagaggccagggtacatctgcagggtggctgagccctgtgggggcggacagccaagggaccctggagggtgttggccctggagcaggcgcacctaggctggagagggcagagggtcctggcactcaaggcctgagaagggccatctgtcctcacacaagacaggggactcgaagcggggctgcctcagggcgtgtgcatgccctgcttccccagatggtcctgggatgcccctggagatgcagaaattggg

SEQ ID NO: 2093 - DNA, 1200 bp, Homo sapiens
  misc_feature (1)..(1200): DMR14:105593501
tgccctcacctcgaaatccttgacaatccagggtgccctcacctcgaaatccttgacaatccagggttccctcacctcgaaatccttgacaatccagggcgccctcacctcgaaatccttgacaatccagggtgccctcacctcgaaatccttgacaatccagggttccttcacctcgaaatccttgacaatccagggttccttcacctcgaaatccttgacaatccagggttccttcacctcgaaatccttgacaatccagggcgccctcacctcgaaatccttgacaatccagggcgccctcacctcgaaatccttgacaatccagggcgccctcacctcgaaatccttgacaatccagggttccctcacctcgaaatccttgacaatccagggcgccctcacctcgaaatccttgacaatccaggattccttcacctcgaaatccttgacaatccagggtgccctgacctcgaaatccttgacaatccagggttccttcacctcgaaatccttgacaatccagggcgccctcacctcgaaatccttgacaatccagggcgccctcacctcgaaatccttgacaatccagggttccctcacctcgaaatccttgacaatccagggcgccctcacctcgaaatccttgacaatccagggttccttcacctcaaaatccttgacaatccagggctccctcacctcgaaatccttgacaatccagggctccctcacctcgaaatccttgacaatccagggcgccctcacctcgaaatccttgacaatccagggtgccctcacctcgaaatccttgacaatccagggttccttcacctcgaaatccttgacaatccagggtgccctcacctagaaatccttgacaatccagggttccttcacctcgaaatccttgacaatccagggcgccctcacctcgaaatccttgacaatccagggttccttcacctcgaaatccttgacaatccagggtgccctcacctcgaaatccttgacaatccagggttccttcacctcgaaatccttgacaatccagggtgccctcacctcgaaatccttgacaatccagggttccttcacctcgaaatccttgacaatccagggctccctcacctcgaaatccttgacaatccagggcgccctcgcctcgaaatccttgacaatccagggcgccctcacctc

SEQ ID NO: 2094 - DNA, 1000 bp, Homo sapiens
  misc_feature (1)..(1000): DMR14:105676301
tttcctgaagccctgtgagctgaaatgggacaagttgatgtaaacttcagagaaatcatccccacagatcctgtgcgggcagcttctgcaacacctgacctgcaaatcaggaaggcccttcagctgcctacctggctgcagctgaagatgcttcaggcccagcgtctagaaatcttctggcctggtgcccactgggctcagaaactgcatttctaagtgttaacctttgtgtttcatttattttcagagtctctcctcttcgaatgtccaactgctagcaccatgcggcgaaatgtcctcttctatccagtcccaacagaaaatccagctggttcttaatgaacgaaaggccacccaacaagaaaatggacttatattgttggagggaaacgagaatgtctcctctttccttaaacagtgtggactgacaaagattctctgcttggctaaactgcagtcgggctctggaaacttctcctaggccggcctgcacttccttgtaagaaaaaggctttaaaaagtacccggtggggcccggagcggtggctcatgcctgtaatcccagcactctgggaggctgaggtgggctgatcatctgaggtcaggagttccagaccagcctggccaacatggtgaaaccctgtctctactaaaaatacgaaaattagctgggtgtggtggcacgcgcctataatcccagctactcgggaggctgaggcaggagaattgcttgaacccaggaggcagaggttgcagtgagccaagatcgtgccactgcacgatgacacgtgccactgcctggtgacagagtgagactacgtctcaaaaaaaaaaaaaaaaagaaaaaaaaagaacccccctaaatcaggttaaagacccactcttgacatttgatcacccttgatcctgagttcctcatcttccaccatctcccaggtctgatcaccctggtctgtcttcagcaaaaatcttcctgggctaatttagccagaaccctcct

SEQ ID NO: 2095 - DNA, 4300 bp, Homo sapiens
  misc_feature (1)..(4300): DMR14:106732901
aaaattgcacgcaggattgtgtaaagacaatgccaggttggactgccagaacaagccaacagcgcgtgatgtgcttccccctgcagagagcctgtgaatggacgtgcagtcagggaggtttcacatcaccaagattcctgtcccagaaaagcagatgttcatagctctgggaatggaatgcgacccttgtggagagcctataaacggacgcatggggggcacctgtccatatggataagatagggctataaacgcccccatcttgccacggctcttctaagcctctttagggttaaggcatactcccttttgagaaattccggtctaacccgttgtctagcttcacgtcctgtttcatggattgtttgtaaccagcttttgctgcaactgttactgctgattaatatcttgctaatcacaggttatggaaagactgtgtttctgttttaaggctctgttagaaattatggatgcacacactatattgtaaattcttatctctgtaacctctacatacaaatgtactgtacttctgcatacagatgttatgttaaagaattacttcatcctgatgtgaccatctcacctcataatcaaatgatcctaaatccctcactaacctacccccacccttactaaacttaataataaatgctggtatatccagtgcattgttggcaccatgggaccagaaggcggtgactcccctggactcagtgtacactatcttgtgtgtgtctattatttctcaacctgctgatcctcctgggaacaaagagagagccccattgcattgcaggctgctggccagatcccacaataaatgggaatctgcaattagctggattccttggcattggtgtttttttaatgtttaatttatatagatacataatagttcaaaatctttagggggtacaattgatattttgataatagcattttatgttcaatgatcaaatctggataactgggatagcctttatctcaatcattgattactttttgtgttatgtgcactctaaatcttatcttctagctattttgaaacatacagtaaattattaactggagttgtctatgtgtcgctttagcattcccagcagcaaggagtgaaagttcctgtttttcaacttcctcatcaccgtttgatattgtctacattgtgtattttacccattctcatagattagcagaatttttaaaaatattaaacaaacatgtacttcatgaaaatcaagttgatctctttttatatatatttttagatgtggtttctattcaggtctttgcccattttaaaattaaatgttgtggttttattgttgttcaattgtaagttaatttgtatatttgtgataaaatcccttttccaaataacggatttgcaaggaaattctccaaatctatagcttaccttttcactcttatgtaagggtttattttcaaaggcataggttagtttatccatatatgaaaagaggataattgtaattctacattcttagaatcattagaataatgttggttaaaataatccctgtatccagcactttgtaagttttggtataataccagtgagaaaaatttatagagtgttctgcgaaggccagaaatcagaaggtgataaagtgacaatcgtatttgaataatccggagatatgaagtgtattgggtattcatctccttctatttgtctatgaagagaaaatggatagatgacatctccatgtgaaatgggacacatagtttttaagatgattctgaaggaaagttgctaatacaatctctcaggtgatgttccaacacaggctgtggaggggatggtggccgccggtggttgctgtggccactattttgtccatgagagacattagactgtgatgtaccacatgcaggcgagtttcttaatctcagataaggggagaacatgagaacacagaacacgggaaaattgaagatctcactacatcaaccacattccactgaggagaacttgtcactgagagacccggggatgctcagggaatggagaggactttgggggatgttatccatgaaagaaccgatccaacttcgttgacttccccatggaaggagtgtttatatgtttattcacagagaatggtggcttatgtcaggattcccacaggtttcagaaatggttctaataacaaatgtcatactttgtttagaattgatttattttttataatttattttccccctctaggcagcaccacagaagaatgttctcagaatccttcctgatcttctatgagtttctggtgtagctcctggaggaaaaggctgtgtgggagggagccctcctcatgtgcagccctgaggcagtcccgtcagctcacccaccactgcccttcagtcacttcctgaacacttatgagttaaccttcctgaaacgtgatatttggcagtgtctttcccaggtaataaaatacttccattctgtttatccctgcaggcccctgtccctttctggagcatgggttgcagttgagtgtgtgctagtggataatcagtgggagaaggtttgtgtacatcttgtcatcttccagagtgcacccctcatggggtggacactgacaagcacgcagatatgcttgctcagctgaaggatgacagacgtttttgtaacctgtgacccaatcaggctcaggcctctggctaaagtgtagtcagcaaagggtacagtgcccaaccctgagagctccttccacgtgccaaaccactttgtaaaggaagctttgtttttcctgcctggatctcatgcatgtgtttgcattttctgcccaaagtgctttatccagaaacacccacaagatcttacagtgttttgaatccgactgaagggcattattcacgaaagccctcatgaccaaagtctccacttctcattaaaggacattaattataggattcagcagaagccactggccttttagttgcacagacctgcctctacaccagtggtccccaacctttttgccaccagggaacagtttcatggatgacaatttttccatggatgagggaggcaggtggttatgggatgaacctgttccacctgcaatcatcaggcattagattctcatagggagcggtcgccctagatcccttgcatgcacagttcacaatagaatttggctcctaggaaaatctaatgcgcagctgatctgacaggaggcggagctcaggcagtgatgctcaccccctgttcatctcctgctgtgcagcctgctttctatcaggctgctgaccagtacgggttcactgcctaggggttggagacccctgccgtaagtgcttggagaccttatcctcttggtaggggcatataaaaccaggagtcagacgagctctaaaccgctgtacattttatggactcttgaggagatcccctgctgtaaattcttggagaccttaccttctggaaaggggcatagaaaaccaggagttagttgagctctaaatcaatgtacattttatggattcttgaggaaacagtgcaaagaggatcatccccactcactttccctctacctggcatcatttcctgtaacccactagaagaacctggggtgcttcaaggtaatttaggcttgttataccaggggccaccaggaaaggaaacaatcaaggtgtccatgtgggttcatctgttgcaagttatttattacttcagcgcagggtgttgatcatggagaagtctgtgcatgtcttgggcaggagtacatgggaatgctgtttattctactcaaatttgctgcaatcctaaaaatgttttaaaataaaattaatgtaaaaggagtggcaaagacattttgttagaaatgttggtcactttttagaaattatatttagtcttaccatgtgatcaagcaatcctgctccaaatgatttatccattcgattttaaaatttatgtcctcacaaaggaatgtttgcatccactccattgattgctgcctttcccactctgtgaatgttacttacagggtgaaagttgaaaagattatttcctatataattggaatgtatacatctttctatttctacttttactctgtgacttaacccatcttctaaacactttaaacctcataaatgctgtcatcttttcagccccagcacagctgcctccttcctcagggtttctgacactctcagcatgtgggttttcacactgtgtctgttgcacagtaatacacggccgtgtcctcagatctcaggctgctcagctccatgtaggctgtgtctgtagacgtgtccgcggttatgg

SEQ ID NO: 2096 - DNA, 1600 bp, Homo sapiens
  misc_feature (1)..(1600): DMR15:17575501
aactttgaggcgtactgtggaaaatcgaatatcttcgcataaaaactacacagaagcattctgagaaacttctctgtcatacgtacattcatctcacagggttgatcctatttcatgattgagcagttttggaacactctttttgtagaatctgcaagtgaatatttggagctctttggggcctactgtggaaaaacaaatatcttcacataaaaactacacagaagcattctgagaaactactttgtgatgtgtgcattcatcccacagagtagaacctttcttttgattgagcagtttcgaaacactcttttggtggaatctgcaagtggacatttggaaagctttgaggcctattgtggaaagggaaatatcttcaaataaaaaccacccagaagtactctgtgaaacttctttgcgatgtatgcattcaactcacagtgttgaacctatgttttgattgagcagtttggaatctctctttctgtagaatctgcaagtgaatatttggagccctatttcgccctatactggaaaagcaattatcttcaaataaaaactgcacagaagcattcagagaaacttctttgagatgaatgcattcatgacacagagttgaaactttgttttgatttaggagttttgagacaatctttccgtagaatcttgaagtgaatatttggagggcttggagttctgttttagagaaggagatatcttcatcaaaaactacacagaagctttctgagaaacttctttgtgatgtgtgcattcaactatcggagttgaacctatcttatgattgagcagtttggaaacactctttgtagagtctgcaagtggatatttacagagatttgaggcctattgtggaaaaggaagtatcttcacataaaaaccacacagaagcactctgaaaaacatctttgggatgtgtgcattcaactaaccgtgttgaaacaatgttttgattgagcagcttagaatctctctttttgtaggaaatgcaagtggatatttggagccccatttcgccctatggtggaaaacgaaacatactcacaaaaaagctgcagagaagcattctgagaaacttctttgcgatgttggcattcaactcacagagtcgaatctatcttttgatagagcagttttgtatctctctttttgcagaatctgcaagtggatatttggaaagctttgaggcctattgtggaaagggaaatatcctcaaataaaaactacccagaagcactctgtgaaacttctttgtgatgtgtgcattcaactcacagtgttgaacctatgttttgattgagcagtttggaatctctccttttgtagaatctgcaagtgaatatttggagccctatttcgccctatactggaaaagcaaatatcttcaaataaaaactacacagaggcattcagagaaacttctctgtgatgagtgcattcatcacacagagttgaacatttgtttagatttagcagtgttgagacaatctttccgtagaatcttgaagtgaatatttggagggctttgagacctgctttggagaaggagatatcttcatataaaaactacacagaagctttc

SEQ ID NO: 2097 - DNA, 3600 bp, Homo sapiens
  misc_feature (1)..(3600): DMR15:20520601
ctcatacaacagcttcttaggtaaatcatattagctgtattgtattgtgttttatttatttacttttttgttttttgagacagagtttcgctcttgttgcccaggcccgagtgcagtggtgcgatcttgactcactgcaacctccgcctcccaggttcaagtaattcctctgcctcagcctctcgagcagctgggattacaggcatgcgccaccatgccccactaattttgtagttttattagagacagggttttgtcatgttggtcaggccggtcttgaactcccgacctcaggtggtccatccactttggcctatcaaaatgttgggattacaggcattagccaccacgcctggcctatttatttacttattaatggtgttttttttttttttttttttttttttgagatggagtcttgctctatcgtccaggctggagtgcagtgtcacgatcttggctcactgcaacccccgcctcctgggttcaagctattctcctgcctcagcctcccgagtagctgggactacaggcgtctgcaaccacacctggctgatttttgtatttttagtagagatggggttttaccatattggtcaggctggtctcaaattcctgacgtcaggtgacccacctgccttggcctctcaaaatgttgggattacaggtgttagccactgtgcctggcctgtattgtattttaataggtgattattggttttcatattaagatagtgaaatctagcgcaaggatctcaaaaatttgtttgatgattgaaggaatattctgaaaattacctagtatagatgttaggataaagagcagacccttttcaatataggtgagaggagaagttggagggtgtgatgatactcaaaagtttttcactgaagagaaattggggcgtgcagtaaacatgtaaaaagattcttactaataagcaggtggatgcaaatgaaaatcatcatggaaggttatttttaaaactgattgtatcattgcctcactttatatattacagagttatacatactactttgtaagataacttttcttttcaaaactgaagtcaatgtgatagaatggtgagcattattttggaaggccagactaggaggaggtgggaggaagaagtcagactcagcctgtgaacagacgctaaccttggcagaagccaaaacagtcagacagtgttgtgtaaaaatgatcattcaagaagagcgaaacagcaaggtgatttgtgaaagagatttattagaaaatgaaacacatttatacctctgttcaataaaaatctgcttttcgtcaactgatgctcctggtttttgtttctacacatagagaaagcagagccctggcagcttgggtcaggcagccgagtacagaccagggagccctgggcagtggctgcagctctcagctggcctgttcatggggccatggtgggtctgtggcgtggggtgggcctgtggcgtggggtgggcctgcggcgtggggtgggcccgcggcatggggtgggcctgctgtccacagccagaaaaactaacttagtgcacacacagtgaaattttgaaacaggaagttttagagctagtttctgtcatagattttagtaaatgctattttgcaaaacctttttctgatgtttgttttgtttttctaatctgataatgcatatttcacacattctggtctttaacaaatggaaataaagagaactaaacaatatagtttgtgtcgatggaaagagcttgggatttgttctcagaaaatttcagttacaacagtttgttcatataggtggacttccaacacagtaactataggagtaagaataaaagctgtgtttactttcacagagttaattaagaatacatgagaaaatggatgttaaaaaccttgtaattaaaatgtacagttacatgcaaagttttaaagtgagcattttccagaggtgcttttctaagttcttgaatgcctctcccttttctgaagtggctgcttcgtggggctgttggtctttggcagggggtgagtgcagggttcctgttgtgggtcctttgttctcacgagggcagtgcccgttttccccgtctcctgcttgcccagactgttcccgtgcgcagagagactggcctgtttgacctgcagctgtgctgtttgagctgcagctgtgtagcctgcgctggcccatctggctacactcaacaccgtttgctgatcagcacttgaagtctgtccgtcatagctgagacactgaatattttatctgtttaatttttattcattaaaatgcaggtttgaaaatttgattctgttattagaaagcacttaagtatgtttagaatcacttggccttgggagtctactttgtcaactgtgtattttatgagtctaaatggagatcagatgttttcaatgcaaatttcacggtccaaattgaaatgtgttacatatgtaagctactcagatggtttttgaggacttaatatgaaataacctatgtaaaatatctcaataatttttcttagattgatttcatgttgaaatggtcatatttttgatctgttggaataactatgatacattattaaaattatttttattttttaagatggaatcttactctgttgaccagaccggagtgcagtggtgcaatcttggctcactgcaacctccgcctcttgtgttcaagtgattctcctgcctcagcctcctgagcagctgggactacaggactacagactcccgagcagctgggactaccaccacgcctggctgatttttgtatttttgtagagacagagtttcaccatgttggccaggctggtctcgaactcctgacctcaagtaatctgcccgctttggcttcccagagtgctgggattacaggcatgagccactgcaaccagccattattacaattaattttatgtgttgttgtttttcttgttggtgtgttttttgttttttttttttacttttgttaatgtgactaagaacaattttttttccccacccggagatggatcctcactctgttgcctggactggagtgcagtagcacgatctcagctcactgcagcctctgcctcctgggttcaaatgattctcctgcctcaacctcctgagtggctgggactaacagaagcatgccaccatacctggctaatttttgtatttttagtagagatggggtttcaccatgttggccaggatggtcttgaactcccaacctcaggtaatctgcccacctcagcctcccaaagtgttgggattacaggcgtgagccaccgcacctggccatgtttattaatacgactaagaacattttgaattgcacctgtggctccattggtgtcctgggcaggtggctctgtgctgtccacacaggttgtctcctgtgtcttcgtcttcgctgcgtgtgactttttggttcctgtggcacgtggggtcctgtatgggacattggttctacagcagatttatagtaaggatgtacctactaaaaaatacaaaataaaaagaatagacacaaacatagaaataagtatcacctcacaaaacttttggaaagtagaaaaagaaaaatgcattcg

SEQ ID NO: 2098 - DNA, 700 bp, Homo sapiens
  misc_feature (1)..(700): DMR15:20615601
actttgaaatatatttaagaatataaaaaactggccgggtgcggtggctcatgcctataatcccagcactttgggaggccaaggcgggtggatcacgaggtcagcagttccagaccagcctggctgagatgatgaaaccccgtctctactaaaaatacaaaaaattagccggactcagtgcaggtgcctgtaatcccagctactcgggaggctgaggcgggagaattgcttgaatttggatggcagaggttgcagtgagccaagatcatgccactgcactccagcctgggtgacagagtaagactccgtctcagaaaaaaaaaaaaaaaaggatataaaaaactgatagttttgacctaaaaacagcaaaactagaaagacccaatgcccaactggatgtggcaggagctgagagggcgggagggtgggttagggtgacattgtccccagggagcagggggatgggtgtgatgtgggagccaccccaagccgtccggtgcctggccctggggtgaccaggtgagggaatcaatattcctgcaggacaagagccacataaagaaggtagtggaggggggagcctataggagcagttaatttgcttgtgaaaggcgtgtttatcacctctaagaattagctggccctgggaggagcagtctttccccagccagagaggccccagatgccagagcaccaagaa

SEQ ID NO: 2099 - DNA, 2500 bp, Homo sapiens
  misc_feature (1)..(2500): DMR15:20756701
ctacaggcgcagaacatcatgccccgccaatttttgtattttttgtagacacggagtttctgccattttgtccaggctggtctcgaactcctgggctcaagcaatccacccacctcggcctcccaaagcgctgggattaaaggcatggaccgccgcacccggtccagaatacaatttcaagctgattcaacttcagctcctaatcaaaagcttagcgggaagaagtgaattttcaaacaaaataaacccctccccccaaaattgtaacctacccacattagcctgcagaattccacaaaccaggattgcattaccgcaggccctaacagattcacctcctctgagttgccttttaacattctacccttgacttttctggaaactgtctgggagagctagtcaaatgaaatctattcctgcatctgttgtaaagtttttccacagcactttctgaaatttattttcaatgtttattgttttttcactccacttagaatgtaaaagctacttgaagataaggatcttgtttgtcttgttcaccactatttccccagcacctagaactgtgcaggctaagtagtaggcagtcgaatttcttgatagctggctgggcgcggtggctcacggctgtaatcccagcactttgagaggctgaggcgggtggaacacctgaggtcaggtgttcgagaccagcctggccagcatggtgaaaacgcgaatctactaaaaatgcaaaaattagccgtgcatggtggcgggtgcctgtaatcgcagctaattgggaggctgaggcaggagaatagcttgaacctgggaggcagaggttgccatgagccaagattgcgtcactgcactccagcctgggtgacagagcgagactccatctcaaaaaaaaaaaaaaaaaaaaaaaaaaaaaatagctaacatttattcatacaactcatctaattgaatcttcacaactttaataggtagacgccgttatctccatgttacagatgaagaaagtgaagcacagaataaattgcatgtattaaaacaaaattcaaacccaaacccagcagacaacaaacaaacaaacacacaaacacacaaaaaaccactgtactctcacccaccaggctgtactgcccagtgcatgacacagtagcctgaaataaaatctcaagtaagaaattactttaggccgggcacagtgtctcatgctggaaatcccagcactttaggaggccaaggcaggtggattgcttgagctcaggagttccagaccagcctaggcaacatggtgaaatcccacctttacaaaaaataccaaaaaactggccaggcatggtggtgcgtgcctgtagtcccagctatttgagaggctgaggtgggaggatggcttgagcctgggaggcagacgttgtagtgagccctgattgtgactgcactccaactgggtgtcagagcgagaaaaaagaaagaatgaaagaaattactttagaggtaattcttggaaagcccttgctttactaccagaaaaaccagtgcacttcctgctttttgataactcttatgcagctggttgtgtctctcttttcactctggcttccagaaagcccagggctaaatgtgaagctcagcaatgacccctgcttggcccctaaggtccactcttgcctcgactttgcacctttatttatatgtggctgtcctgattttccctttgtgttatatgacggtaggctttatggaatgggagaagaaatagtaaacacataaaattgatgaatgacttaaagacttttattttatttttgagacagagtttcgctcttgttgcccaggctggagtgcaatggcaggaacttggctcactgcaacgcctgcctcctgggttcaagtgactctcctgcctcagcctcctgagtagctgggattacaggcatgagccacaacagccggttaattttttgtatttttagtagagacagcgtttctccatattggtcaggctagtctcgaactcccgaccacatgtgatccgcccgtcttggcttcccaaagtgctgggattacagctgtgagccgccattcccggcttatttttatttttatattttattttattttcacacaaggtctcactcttgcccaggctggagtggagtggctcacagccaccaggtgatttgggcccacaagtcacccttgctaagaggcagagtccagagcagaaactgggtagatgccaaaggcagcactccctactccacacatgggtttctgtcaagtaaatcaccagccaggtgaggtgcatacagcatctagggagatgggacaccgtgttgtcccctccttcagccaggaggccccacactgagcgccactgcctccactgtccgatgctacaggagaaacgtttcctgctggttaaggaagtagaaactgcagatcacttttcatcttattggaaatcactctttgacactcttgcctcatcttcactcagtacaca

SEQ ID NO: 2100 - DNA, 2400 bp, Homo sapiens
  misc_feature (1)..(2400): DMR15:20837301
ctcatcttgtgatattccagtgttctgttcttcagaaagttgtttctgggtatcattttgttcgtcactagaagaaattttaattttcatgaaatactggaggtgtccctaaaatgatctacagggcaagatggcaccatcagatgtcattcacacaatgtatatctgcacattaatccaagacaaggcaaaggggcctcacatctgttaaccctgctctcccagtcatgttggcaccagggactagttttgtggaagataatttttccatggacctgaggtgggggatggttccaggatgattcaagcacattacatacattgtgcacttcatttctattattactaatatataatgaaataattatataactcaccatcatgtagaatcagtgggagccctcagcttattttcctgcaactagatggtctcatctaggggtgacaggagatggtgacagatcataaagcattagattctcatcaggagtgaacaacctagatcccatgcatgagcagcttgcaatagggttcaagtcacactcttatgagaatctaatgtcaccgctgatctgacaggaggagcagctcaggtggtaatgtgacagagagtggctgtaaacagatgaagcttcacttgctcatctaccactaacttcttgctgtgtggcccaggtcctaacaggccagggactggtactggtctgtggcctggggattggaaacccctgtgttaactcaaactttttatgtttattttttggaaacagtttccacttatattcttgattcctctgtaatttatagacaaattagaaattccctttggaacaagacagggtctaatattgtgtttttaacatagaactttgaattaattttatctgtgtatgagagagagatgtgaaataaactgatcattaatcgctttcaatttcacttttatttcatgcatattaagaagaaaactgggaagccctaggcagagcaattgggcaagagaaataaagggcatccaaattggaaaagagaaagtcaaactctctcttcaccaatgatatgatcttatgcctagaaaaccctacagactcctacaaaacactcctagatttgataaatgaatttagtaaagtctcagaggttacaaaatatacaaataccaatgaatagtaccactatacaccaactacaaccaagctgagagtcatatcaagaatccaatcctttttacaatggctgcaaaatagtaaaatacctaggaatatacttaatgaaggaggtgagtgatctatcaaaggataactggaaaacgccactgaagaaaatcatagatcatacaaataaatgaacatacattctatgttcctggactgaaagcattgatattgtgaaaatgccatagtgcccaaagtagtctacagagtcaatacagtttctaccaaagtaccaatgtcattcttcacagagttattttaaaaagctgtcattcatgtagaaccacaaaagagcctgaatagcaacagacataccaagaaaaaggaacaaacatgttggcatcaaattacctgacttcaactctaaggccacagtaacaaacatcatggtactggtataaaagtacatacacagatcaatggaacagaatagacaactcagaaaaaaggccacttacaaccaaatgatctctgagaaaggatacaaaaacatacactggagaaagtacacgttattcaacaaatggtgctgggaaaaaaagatagtcacatatagaagaataaaattggatctctatctctcaccatgtaaaaaattaattcaagatggattaatggcctaaacctaagaccagaagacattagcctaggcaaataatttatgatgaggaccctgaaagcaaaagcaacaaaaataaaaataaataaataaataaataaataaataaagacctaattaaactaaaaagcttcagcacagcaaaagaaataatcatcaaagtgagccaaccacttatacaatggggaaaatatgggcaaattatgaatctaacaaaggattaatgtccataacctaccagaagctcaaacaaatcagcaggaaaaatacaaacaattccattaaaaagtgggcacatgacatgaatagacatttttcaaaagaagatgtacaaatggtgaacaagaatataaaaacatgctaaatattactaatcatcagggaaatgtacaataaaacaacagtgagatatcacctcacttcagccagaatggtcactactaaaataaaaaaaacagcagatgttggtgtggatgtggtgaaaaaagaagatttatacactgctggtggggatacaaattagtacaaatctatggaaaacattatggagagttctgttaaagtaga

SEQ ID NO: 2101 - DNA, 700 bp, Homo sapiens
  misc_feature (1)..(700): DMR15:20906201
tgtaaaagactttggggactcgagggggaaggctgggaggcgggtgagggataaaaaactacatattaagtacagtgtgcactgctcaggtgacaagtgcactgaaatctcagaaaacacactaaagaacttatccatgtcatgaaaaaccacctgtatttccaaaacaattgacacttaaaaaaaaaaaaacctaatgacgtatcttagagagctagaaaaacaagagcaaaccaaaccaaaattagaagaaaagaagtaataaagatcaaagcagaaataaatgaatttgaaataaaatacaaaaggttaataaaatgcaaagttgttttctggaaaaaaaaaaaaaaagaaacctgacagacctttactcagactaagaaaaaaaaaaaaaaaaaactcagcaggcagtggctcatgcctgtaatcccaggactttaggaggctgaggcgggcggctggaccacctgaggtcaggagttcaagatcagcctggccaacatggcaaaaccccgtctctattaaaaaacacaaaaattagccaggcgtggtggtgggcacctgtaatctcacctactcaggaggctgaggcaggtagaattgcttgaactcgggaggcggaggttgcagtaagctgagatcgagccactgcactccagcctgggcaacagagcaagtctccatctcaaaaataaataaa

SEQ ID NO: 2102 - DNA, 300 bp, Homo sapiens
  misc_feature (1)..(300): DMR15:20936301
aggcggaacttgcagtgagcggagatcgcgccactgcactccagcctgggcgacagagtaagactctgtctcaaaaaaaaaaaaaaaaaaaaaagaaagcctaggttttaaagaccaataaaatagtaaacgtgaacgaggaaaaaaagaaatgaggaaacagttacaaacatagatactgaaggtaattatatgataatatagaaataaaatacagcctttaattgtacaagtaaaatatataaatattatatacaactctgcactgataaaattgaaaaacatgttttgtaggaaaga

SEQ ID NO: 2103 - DNA, 800 bp, Homo sapiens
  misc_feature (1)..(800): DMR15:21152701
accaaaacttgttatgcagaaagcagtacaaaggcagagatttacagctataagtgcctaccatccaaacaaaagaaaaacttcaagtaaacaatacatcttaaagaactagtaaagaacaaactaaaccgaaaataagaaaataaataagatcgtagcagaaacaaaattgaaataaaaacctcacaagattaaacgaaaagttggttttctggaaagctaaacaaaattgacaaacttttaaccaggctaagtaaagagacaagattcaaataaataaaatcaacagattaaaaaaaggagacattacaactaatacttcagaaattcaaaggatcataactggctattatatgccaataaattggaaagcctagtagaaattggcaaattcctagatgcatacaacctacttaggttaaacaacgaaaacatccaagaccagaacagattggtaacaagtaatgagattgaagccatcagaaaaagtctcccagtaaagaaaagcccaggaactgatgtcttcactgctgatggcttcacaccaaacaatttaaagacctagtacaaatcctgctcaaactattttgaaaaacaggagggaatacttccaaacttattctatgagaccattattactgtgataccaaaatcagacaaaagcatcaaagaaggaaactacaggccaggatctctaatattgatgcaaaaatcctcaacaaaataccactgaatcaaattcagtaatacattaaaaagataattcatcatgatcaagtgcaatgtatccctgggatcaa

SEQ ID NO: 2104 - DNA, 500 bp, Homo sapiens
  misc_feature (1)..(500): DMR15:21156501
agatattaatatattcactcctgcttccttaaaaaattaatgatttcacaggatatctttctccattcttttactttcaacctacttaggtccttaagtgagtttgaagtttcttatgaacagtatttagttgggccatgtgtttattataggctctccatcaatctgtcttttggtttatttagaccatttacatttaaggtgcttattgttacataattgcttatgtctgatgtttttattatttgcttttttgtttcctttttctttccctccatcttgatctatttctgtataatgttgttgcgtgtatctctttgtatagtcttaaagtgtttgctctggatgttacaatatgtgtattgtaatatagtagtctactggtaccagtatttaccacttcaaagtgtggaaacctgccttgcatttatgtctctttaccttttccacttgtataaatcactggcttgagtattaggtggtggtatagtttttgtttc

SEQ ID NO: 2105 - DNA, 3800 bp, Homo sapiens
  misc_feature (1)..(3800): DMR15:21172601
ttcaagataggagaaaccttttctatatagttgactttaataaaagcctagggcaaaactttcaatatattaacagtatttatgaggcagttaagaatttgggtcatctccgtctccactaaaaatacaaaaagttagccaggtgtggtggtgggcgcctgggctacttgggaggctgaggcaggagaatggtgtgaacccgggaggcggaggttgcagtgagccgagatcatgccactgcactttagcctgggcgacagagcgagaccctgtatcaaaaaaaaaaaaaaaagaatttgggtcatctcaattaaacatagaatttaagattacgttgaaaattcagtacagagtattttgccttcatctgttgtttgagtctcccttcttttagccatccttccatcagaaatagaataccaagttaaacttcttaattagaatcaggaatcaggactctttggctgctgattgaaggaagaactgtccttaaatccagagtgggccgggcatggtggctcatgcctgtaatcctagcactttgggaggccaaggcaggtggatcacctgaggtcaggagttcaagaccagcatgaccaacatggtgaaaccccatctctactgaaaatacaaaaattagccgggcgtggtggtgtgtgcctgtagtcccagttacttgggaggctgagacaggagaattgcttgaacctgggaggtggaggttgtgtgagccaagatcgcgccactgcactctagcctgggtgacagggtgagactccatctcaaaaaaaaatccagagtgtttggtagtcaagacaaaaagctagattatttttgttagtctgggaaataagcaccttagtggcccaaagacaaggcctgaaatttccatgaaaagaaactgggatctattcatctgttctgttgagacctcatagttccataccacagaaataggcacagtgggtttcggggggagagttgtaagtataagctctctgttcctctatattggccatctatagaccttctttggagaaatgtctattcaagtcctttgaatcagattttttgttgttgttgaattgtagaagtcctttttatattctggatattaaacccttatcaggtaaaccattcacacatattttctctcgttcttcggggtgtcttttcactctgatagtgtcctttgatgcgcaaaggtattttaattttggtgaagtccaatttattttttcctttgttgcctgtgcttttagtgtcatagccaagaaattaccaaattattgtttagttttttaaaagtatttatgtggttatttggctgatacctgtctctaatgattgacggcacttcttgagcgcggcttttaaacatgcaaatttgatgtcactttccgaggctccttccatggcatccctttgcttctaggccgcagcccttgtctggcctcgctgctgctctggcccctgccctcctctagggcctctcttctgctgcctccagctctggccacagtggcctttcattcctcagtgcacttgcctggggtcctcaacacttgcagttccctctgccgggaatgcggcagctcctacgtccccctcccggcctccacctcctcgctgctccttcggacgctggtcctgagaccactggtcggtgcggccttccctggaccctctccaaactccccagtactcctccacacttttctccaaaaaaccagtggcactcaattgtgccgtccagggacccctgggattttcacgaccctgtcagtggctgagtgaggttgagtcaagaatgtttcgtgacaataaggagatgttattgatctcttttcactggaagtgggagcgtcttgcggggggacagcgggctgaggatgcagctgtgttaggacgtgacagctcgcacaactgaagcaccaccactttcccacggtttttttttttttttttttttgctttggaaaacatttctcacaaaatatgcaacttatgttaccatgtaatgggcttgcttctgttactttaaaacaaactaataaatctcttaaatgtttctcagctttattttttgttgttatggttcgttttcttctgtttcccccagctttatgaaagtttaattgacaaacttgcctatctttactgctcacagcgtgctgctttgctgtatgtgtgccctgtggaatgcttcctggtgctgctgcacacctccatcacctactgcggtgagggcccctgggatctgcgctcccggcgctgcgccctcgccccaccgctgtgcctgagcgccccccccccccatcccgcccggggacccgcgcccgctcctggaaccgcacccatggccagcgccctgtccccaaccccgctttagtttccacccacgcgaagaaactcagcctcggtcctgtttaggcacggaaagggctggagaaccgcgtccttccgaggcgcccccagcgcggctccccacagcgtgcaggaccccggactgtcgcgccgcgcccggggacgcacaggaggtgggatccaggagcgaagcccctgcagcgtcccagactggacgtggccctgcacccccagctgctgggctggccgggacatgcatgagatcgcgcgctttacaaactgttgttctttctgggaaagttaaagaacgcgctgcagccgcttcgcctgctgctgaaaggagccaggcagggctggtcactccgcgccacgccccgtgcgccaacaccggaaggtgaatgttcagaacatttttatcatttaaagccagtataccggctgggcgcggtggcttacacctgtaatcccagctacttgggaggcccaggcaggaagatccgattgagcccaggagttccagagcaccctgggcaacatggcaagaccctatctctacaaaaaaaaaaaaaaaaaagccgggcgtggtggtgcgcacctgtggtcccagcaactcgggaggctgaggcgggaggatgacctgaattcagtaggtctccagcctgggcgacagagcgagaccctgtttactaataaataaagccagtgtacctaaaataccatcataacatggaatcagtataaaaatgattattgaactacttgacattcctgttttgtgctaagtctttgaaatttggtgtagtgttttgttttcttttctcttttgagacagagtttccctcttgttgcccgggctggagtgcaatggaatgatctcagctcactgaaacctcagcctcccaggttcaagcgattctcctgcctcagcctctggagtagctgggattacaggtgcccgccaccacgcccggctaatttttttgtatttttagtagagacagggtttcgtcatgttggccaggctggtctcgaacccctgacctcaggtgttccgcctacctcaacctcccaaagtgctaggaccacaggcatgagccactgtgcccggcccggtgtgtactcttataacacctctcaattcaggtctaaattttgtgggaaataatctatatttaggtttcacagtattcacagttgaaaaaatagatgtatatccccttgtttcaaatgtaactgaacctagtcccttgtttgaaattcaaattaattgaaattaaaaatttccagttctcggcagcagttgcacatttcaagggctcaatggccccatgtggcagtggtcccgtagaggacggcacagctctagacatggtgtaggaagttggagaaggcttccttagggaagcaagtgacggttgagccatgaccagaag

SEQ ID NO: 2106 - DNA, 5800 bp, Homo sapiens
  misc_feature (1)..(5800): DMR15:21325001
atggcaaggcccgccacggcacagcctcctcctccaccatctcaccaggctccctgccaggcccggcgcagggcagcgactgagctactagggcgtctggtccggctgctactccgccgccgccgccgccttctcacaaccacaacaacactgcagcagcggccacacagagtgcactcccgacgccgagccgggcgacgagcggagacgcgcgcgcacgctcgggcgctgaagccggtgtccgggaaagggggcgggtctccgggaaagggggcgggtctccgcctgttggacgggggcggggcctggacaggtggtcacgccccaggagataggcggggctgcagcccagacgaataccagcggctggggagaggctcgcgaaaaagaccagcggaggcagaagggctagacagatgggaattgggcgcaggaaaagcgatgacaaaaaaaaatctggaagataaccaaaggtggtcctacaaatttttaggaggcgtctttccctgggcaagacatggctcactctacttaccagaaaaatagaacaacagtggttatctttcacctgcaattgtggtcaggataaaaccagtttaatatagtgcaagtaaatgtagtgttttagaagatgtattcaggatacaatttctttttttcgtttctttttttttttctgtcgcccaggctggaatgcagtgacatctcagctcactgcaaactccgcctcccgggctcaagtgatcctcccacctcagcctcctgagtagctgggactacaggcgcagaacatcatgccccgccaatttttgtattttttgtagacacggagtttctgccattttgtccaggctggtctcgaactcctgggctcaagcaatccacccacctcggcctcccaaagcgctgggattaaaggcatggaccgccgcacccggtccagaatacaatttcaagctgattcaacttcagctcctaatcaaaagcttagcgggaagaagtgaattttcaaacaaaataaacccctccccccaaaattgtaacctacccacattagcctgcagaattccacaaaccaggattgcattaccgcaggccctaacagattcacctcctctgagttgccttttaacattctacccttgacttttctggaaactgtctgggagagctagtcaaatgaaatctattcctgcgtctgttgtaaagtttttccacagcactttctgaaatttattttcaatgtttattgttttttcactccacttagaaggtaaaagctacttgaagataaggatcttgtttgtcttgttcatcactatttccccagcacctagaactgtgcaggctaagtagtaggcagtcgaatttcttgatagctggctgggcgcggtggctcacggctgtaatcccagcactttgagaggctgaggcgggtggaacacctgaggtcaggtgttcgagaccagcctggccagcatggtgaaaacgcggatctactaaaaatgcaaaaattagccgtgcatggtggcgggtgcctgtaatcgcagctaattgggaggctgaggcaggagaatagcttgaacctgggaggcagaggttgccatgagccaagattgcgtcactgcactccagcctgggtgacagagcgagactccatctcaaaaaaaaaaaaaaaaaaaaaaaatggctaacatttattcatacaactcatctaattgaatcttcacaactttaataggtagacgccgttatctccatgttacagatgaagaaagtgaagcacagaataaattgcatgtattaaaacaaaattcaaacccaaacccagcagacaacaaacaaacaaacacacaaacacacaaaaaaccactgtactctcacccaccaggctgtactgcccagtgcatgacacaatagcctgaaataaaatctcaagtaagaaattactttaggccgggcacagtgtctcatgccggaaatcccagcactttaggaggccaaggcaggtggattgcttgagctcaggagttccagaccagcctaggcaacatggtgaaatcccacctttacaaaaaataccaaaaaactggccaggcatggtggtgcgtgcctgtagtcccagctatttgagaggctgaggtaggaggatggcttgagcctgggaggcagacgttgtagtgagccctgattgtgccactgcactccaactgggtgtcagagcgagaaaaaagaaagaatgaaagaaattactttagaggtaaattcttggaaagcccttgctttactaccagaaaaaccagtgcgcttcctgctttttgataactcttatgcagctggttgtgtctctcttttcactctggcttccagaaagcccagggctaaatgtgaagctcagcaatgacccttgcttggcccctaaggtccactcttgcctcgactttgcacctttatttatatgtggctgtcctgattttccctttgtgttatatgactgtaggctttatggaatgggagaagaaatagtaaacacataaaattgatgaatgacttaaagacttttattttatttttgagacagagtttcgctcttgttgcccaggctggagtgcaatggcaggaacttggctcactgcaacgcctgcctcctgggttcaagtgactctcctgcctcagcctcctgagtagctgggattacaggcatgagccacaacagccggttaattttttgtatttttagtagagacagcgtttctccatgttggtcaggctagtctcgaactcccgaccacatgtgatccgcccgtcttggtttcccaaagtgctgggattacagctgtgagccgccattcccggcttatttttatttttatattttattttattttcacacaaggtctcactcttgcccaggctggagtggagtggctcacagccaccaggtgatttgggcccacaagtcacccttgctaagaggcagagtccagagcagaaactgggtagatgccaaaggcagcactccctactccacacatgggtttctgtcaagtaaatcaccagccaggtgaggtgcatacagcatctagggagatgggacaccgtgttgtcccctccttcagccaggaggccccacactgagcgccactgcctccactgtctgatgctacaggagaaacgtttcctgctggttaaggaagtagaaactgcagatcacttttcatcttattggaaatcactctttgacactcttgcctcatcttcactcagtacacattgactctaccagcaatagcgtaaaaataaacacagattaaggaaataggaatcctttattcctgggacttaaaagcttgactttctccagtaagtcaattaccagtgcccacggcaggaagagctctgatgccagggttgacagcacgctggaaaaccggaggagtgtttgcatttctggggcctcaagtaatgagaagttcttccaagaacactgacaggggtattattgccctattttagaattattactctgaagatcagggaatttcaggcggttgaactcatgccacagcacctgtgcttttctggtaggggagggatggagtccagctcaggagtcccccgtcatgggagaaagcactgtgaggggatgtctgtgggggaattagaaccctatagcagatgggatagggtggggagtctacatatttttatttggatgttttgatggagtaaagttccaaaccaagcaagtatcaggcagggggcagtccaggctgtggtgctgtgctgtgaggctgggagtccaggcaggtcctgtgttcactggtcacttccacagcctgaagcccctcgaaaggacatctgcacagaggcccgctagtgacttcaggatgctgatgatgccctcaaggtgagagccagagaaaatcccgtcaactctgtcaaccaagggcatcaatggccacgtgtgtggttttctcctgcaaagaacaagccagtttgcaaaccatgcttttgaggctagaaaaatggctgtattccttcagtgtctcctgaaggctgggtcccctgagagttgattcaaatactgtattctcgtaaaatatggtaacatttagacctgaaaaatggcctgggggataatcttatcaaacctctgatgtggttattttgtaactgagtatattgaaggctggggaacaaagccatctggtgccagcatcctagctgctctctctcctccaggggcttgccttggttgggggcctttccagcaaaattaggctgaagaaatgagattttagttaaacaaggcccactgttgctttaagacaaaatgtcaaagttttaaaaaatgtattaacttgttcttttggccaagaaatcaatagatgcacttcctttccactgtgcaggcactgagctgacagaggagtaagagcttgaaccatctacgtggtctgagtgaccacatccttcacttggagccctgttctacagcagataattctgagtcaccccagctaatggctgtgcacagcatcctgatgctctgattaggctgaggggcttgtggcgtggtggctaggctgtctcagagagcacctcaggctgggtggaccaggctgacccagaagagggcaatgggcctttgacagggactagctggctactatctgcctcttctgcagtttgggacacttagggtcatgggtgaaagtgtttttccacatatagtggcccgaaaggaaaggaaactcatgccagtgttcagaaagcgtgcgggtttctcaggtaacgttactgcagccactgatgtctaatccaaagagctctgaatgcttgccatagagatttgtagttttaatactgaagccccgaatattctgatttcctcattaagaccgacctaacacgagctatgcagtcagctaaggtatcaacgggaggaaattgccagtgtttccctcttattttcctctgaggtcatctgaaaacaaccgcagtgaggacggagttcgtgcggccctgatggctgtgtgttcccagctccaagcatgcactaaatatttaattcatttgaatataaataagttaatgaatatgaatacattaataaattaattggcatcgttttagtcctgttgcagtttcaaactcaccgatttatccaacttctttgcactgagttcttattcaagtgaagtattccggtcttgtgacttgtacttctgacatagtaatagaacaactaatatttatttagaactttagtttaccaagcactctacattttattttattatttatttgtttattttttttagtagagacagggtttcaccgagttagccaggatggtctcgatctcctgacctcgtgatccacgctcctcggcctcctaaagtgctgggattacaggcttgagccaccgcgcccagcctacattttatttttacattttgtctttacaaacccccacggggcaggcattctccttacacgcagtgttaattggtgacacagaggctcaggggtttaaatggtttcactgtaaacaatgtaatctagtaggatgttgctttcctatttttcctaatactaccatgtttagatgcaggcggctaagtgagagtatatgatttcctgtgtatgtatagatgtaacccacactcataggcggaaagttctgcaggctgagaagtgaagccctttgctgaacaaccaccaccaacattctaggacccccacacccttggttctgcaggctacacccctcccatctgcttagaagcagaaa

SEQ ID NO: 2107 - DNA, 500 bp, Homo sapiens
  misc_feature (1)..(500): DMR15:21471201
ccaaactctaaagttgaaaattaagataactaaaataaaaaattcaccacaaaggttcaacaaaagatttaagtagacgaaagacacaaccagcaagcttgaggtcacttcaattcgtattatcccaactagcagaaataaaaaataatgaataaagatgaacagagcctaagataacaatgggatactataaaatgtgccattacaagcattatgaaaactcccgaaagaagggagaaagataaaatggggcagaaagaacatctgaagaaataatggctaaaaagttcccaagcatgatgaaatacgtgaatctacacattccaaaatctcattgaattcatagtataaactcaaagaactctacaccaagacaaattacaataaaactttcaaaagctaaagagacaactttgaagaaagttatggagaaaagactactatttgcaatgcatctacactgacattaacaactcactaaaaactagagtccagaatat

SEQ ID NO: 2108 - DNA, 2200 bp, Homo sapiens
  misc_feature (1)..(2200): DMR15:21613101
cttccagattttctaatttgtgtgcatacagttgttcatagtattctctgaggatcttttgtatttctgtgggatcagttgtaatgtcatttttgtactttttgactgtactcatttggatcttcttttttttttacttttttttaatctaactagcagtctaacaatcttattttttcaaaagactaactcttggtttcattgacgttttgtatagatttttgcacctcactttcattaagttgttctctaatttttgttatttcttttcttctgctagctatggagttggtttgtcctttattttctaattccttgatgtgcaaagtgcaggaggatgaagctagacccttgcttttcagcatgtaagaaaattaacaggatagattaaagatttaaatgtaaggccacaaactatgaaaatcctagaccaaaatctaggagatatttagagacttttaatctaattgagaaattggaaactgagtcttcctctcttgattaaataaaatgttacttttctataggtgagtagcatacattatatttgaaggattctgaaattttatacatcagatcttatactctgacttcatgcttttatttacagcctcaaaaaattaattaatttatttaaacaaagttctcactccaaagtaaatttctgacaagagaagttggaggtggggggagagagagcgctgattagggaaaaacattaaattcaataaaaaagactcagattctctaggttcttgtatggaaaagaggaactataagactaattatgaaagaaattcaaatgtgagtcaatagtgtggaaatcaagctaaagacaagaaaaatattcatgaactatgttcaagaaatatgaagaactttctctaccatatttaacatcatataggtgttttcacaagactcttactgataggctttactatgcttaccatggtttataacgtgtttatttttgcagagaaccagagtcactccacgagtcctgcctggggccccatgaaagtggccaacaatgtcactgagtttatattcctgggactttcccaagattctggaatgcaattgatgttctttgtcttatttctcctcttctacgtcgtgatcatggtgggaaatttgctcattttgcttatggtcttttctgactcccgactacacacacccatgtatttcttcctcagtaacctgtcttttgtggacattgcctgttcctcagccacagcacccaagatgattgaagactttgtttctgagaaaaagactatttcctactggggctgtataactcagatgtttaccttccacttttttggttgtgctgagatttttgttttgactgtcatggcttttgatcgctatgctgctatctgccaacccctccgttacactgtcatcatgagtgctaatgcttatactgtgctggcatcactgtcctggttgggggccctgggtcattcctttgttcagaccgtcctgaccttccagctgcccttctgtaatgctcaggttatagaccattacttttgtgatgtccacccagtcctaaaacttgcctgtgctgatacaactctggtaaatatgttggtggttgccaacagtggtctcatctccctggggtgtttcctcattcttttggcctcctacacagtcattctgtttagtcttcaaaaacagtctgcagagagctgacacaaagttctctctacctgtggatctcatctgactatagtaactttcttctttgttccgtgtatctttatttatctccatccactactttcccattggataaagctgtgtctgtgttctataccaccatcaccccaatgctgaacccactcatctatactctgaggaatgaggagtaaagaatgccatgaggtggctatggagtagcaagatctccttgaaggaaaagcagagaggatagtttgtcagaattgcaaaatcactgaattagtggataccttcaatgatccctaatttactaataattaaaaaaacagttcctaaaatgcagcttttatattttgtctaacaggaaataatttgaggctattttagacgggctaaacttaaacctttccatacttggcaaggtttattctctcttctagagtacaagagttaacactcctactcaatatctcatttaacctcgttaaatcccttctattca

SEQ ID NO: 2109 - DNA, 200 bp, Homo sapiens
  misc_feature (1)..(200): DMR15:21650901
tctacgcttcatagtccacattattttaaaacaaatgtgctgtgtaacagaagcatatgaaatatttttctgtatcacattgtagtattttgttctagctcaagatctttagcttttaaatttttttatttcaaccacaaaccattttttgaacatgcaccaaaaacatacgtatcttctttatgcatttcatatccaat

SEQ ID NO: 2110 - DNA, 1700 bp, Homo sapiens
  misc_feature (1)..(1700): DMR15:21776801
tatcacctaggtcaggagttcgagaccagcctggccaacatggggaaacctcgtctctactaaaaatatgaaatattagctgggcgtggtggttggtgcctgtaatcccagctactcgggaggctgaggcaggagaatcgcttgaacccaggaggcagaggttgcagtgagccaaggttgtgccattgcactctggcctgggcaataagagcaaaactctgtctcaaaaaaacaaaacaaaacaaaaagaaaaacaaacttgcaaacctattataaaacagccaccccctggctgggcacaggggctcacgcctgtcatcacagcactttgggaggccaaggcgggtggatcacctgagttcgggagtttgagaccagcctggccagcatggagaaacccccatctctactaagaatacaaaattagccaggcgtggtggcaggtgtctgtaatcccagctacttgggaggctgaggcaggagaatcacttgaacccagaaggcagaggctgcagtgagccgagatcttgccatcgcactccggcctgggcaacaagagcaaaagtctgtctcaaaaaaaaaaaaaaaagaaaaaaagaaaaacaaattttcaaacctgttataaaacagccacccccttggcctgacgtcatgcctcacgcctgtcatcccagcactttgggaggctgatgcaggccttgagctcaggattttgagaccagcctggccaacgtggtaaaaccctgtctctaccaaaaatacaaaagttagccaggtgtggtggtgcatgtttgtaatccgagctagctggaaggctggggtggaaggatgacttgaacctgggatgcagagtttgcagtgagctgagatcacgccactacactccagcctgggtgagcgagtgagactctgtctcaaaaaaacaaacaacggtcactcccaaccaactcacattaaaccgttctctcaagggctatggataaacagttcgaattttaagaacacaggctgccatgagacattttaaattttttttgtcagcagagggtagaaagttacaaaactcaatgacaggaaattgcaaatttctaagattatagtaggcaaaatatcaacgtaatcttttttttttttttttttttttgagatggagtctcactgtctcccaggctggagtgcagtggcgcaatctcagctcactgcaagctccacctcctgggttcacaacactctcctgcctcagcctcccgagtagctgggactacagacgcccgccactacgccaggctaatttttttgtatttttagtagagacggggtttcaccgtattagccaggatggtctcgatctcctgaccttgtggtccgcctgcctcggcctcccaaagtgctgggattacagacttgagccactatgcccggccttttttttttttttttaaacacttgtgaaggtacacaggtaaataatcagattttttttttttttttttgagacggagtctcgctctgtcacccaggctggaatacaacggcatcgtctcagctcactgcaacctctgcctcctgggttcaagcaattctcccacctcagcctccagaacagctgggattacagccatgggccaccacgcctggctaattttttgtatttttagtagatataggttctcactatgttggccaggctggtctcgaat

SEQ ID NO: 2111 - DNA, 600 bp, Homo sapiens
  misc_feature (1)..(600): DMR15:22085401
cgttgaaaacagagatcgtcttcaagggaaaggcagtcaggataatatctcactggtttccttccttccttctttcctttttttttccttttctttctttcttttttttttttaagcagagtctcactctgtatcccaggctccagggcagtggctcgatctcggttcattaaagtcttcgcctcccgggttcaagcagttctcctgcttcagcttcttgagtagctgggattacaggtccatgccaccatgctcgagtaatttttgtatatttagtacagaaggggttttgctatgttggccaggatggtcttgaactcctggcctcaaatgatacacctgcctcggcctcccaaagtgctgggacaggcatgagccacgggacccggctgatctcttttccttaacaacaaaaaagtaaaccagtgaagagttatattatgacaagagaaaagagtttttatctcagtgaaaatataatcaaataagagcatcttcagagctggattatactcctaaatgtagtaactagaaatataaagtatctagaagaaaacacagaataatatatttgcttacacaattggaataagcaatgat

SEQ ID NO: 2112 - DNA, 600 bp, Homo sapiens
  misc_feature (1)..(600): DMR15:22241801
cagactccttaagaatctggtgaaagttacagaccctctgctttaaaaaaaaaaaaaaaaagtaatcctgaagtgctgagattgtaggtgtgagctgccatgcctggccccagtgaaaaaacatttaaagcttcattaattaagacctgcctgtcaccttccaccacgactgtgaggcctccctagccacgtggaactctccagctccaagcaaggcctagattaaatgccaccttttctgtgaagccctattggactttctcaggctcgttttccctttggacttctagagcatcttgtagacaatggcaattatcaaggcctggatatatacattatataattgttatgtaattattaatgtggcacagcacaacaaatacggatcttgcagacagaaaaaaaattgtggtcatcctctttatgaactttcttgattgatttcataaaacatctataatcattgtttaatctgagtttttttttattttttgagatggagttttgctcttcttgtgcaggttggagtgcaatggcacaatctcggctcactgcaaccactgcctcccgggttcaagtgattctcctgcctcagtctcc

SEQ ID NO: 2113 - DNA, 400 bp, Homo sapiens
  misc_feature (1)..(400): DMR15:22416301
ttatggtatagtgtgtattgatagcttgtctttcagtcctgctgttagtaatctgtagtctctcttctctttccctttttctctctttggttttgaatttcacttatttctgccctaattgttattagctcctttctttagttccttagatttaagttgttgttctttctctacgttcctaaagaagaatcttaggctactgaggtgagattactcttttcaaagaaccaacttttagctacgtttatttcttctactgctttccaaccttctattttattgatttatgctctaatctttattatttctttacttctgctagcttcagatttagttttctctggtttttatactgccttttaggtgtagagtgaggttactgatttgagctttttttaaa

SEQ ID NO: 2114 - DNA, 700 bp, Homo sapiens
  misc_feature (1)..(700): DMR15:22569901
aaactatcagtactcagtttggcaatcagaaattaccctaacagaaaccctcagatagcagggcccttctgggagcaagggtccagatgaggcagccactgccttggacaggtgggaggcctcccccaatcctagaacgagctggaaagatggtgggggtgcaaagggagaaagcaagaaacgggtgtgggcaggaagggaggaggttggccatgagctcttctgaactccagcttcttctcaggtctgggaacctccaaggtgaaggttcattttaaagggcctggttgtgtttccagtctccctggcagagatcaaaagacgctgagcaacttgagagcacgtggggcggtgcacgtgctccctgcagtcatgctgggagatgccgagtgtgaacacctagaaggccgtgtagagttgttcttcaggaactgagaaggactgttgtacaaaaaaagaccttccgctgttttgtctccatggattccgatggagagtcgttgttctcatctcttcttttgtatgaaatgtctgttttctctggttgcttttcgtattttgtgttatctttggttttctgcagtttccctaagctgggctcatgtatgcaatggtggcccaccccgcccaccccaccatcctccttgaaatttatttaagctgcttgcatctttggcttgatttttgttcccctaccaaa

SEQ ID NO: 2115 - DNA, 1000 bp, Homo sapiens
  misc_feature (1)..(1000): DMR15:22573801
tttctgcctactatgctactgctattagtcttttttaaatgaagatttttatagagaaaataaaggatttcatcctttactttttaatattatagatttcacagacatttctttttgagtagatttattgagttctcctttttttttttctttgaatgtatttatttcttgtagtctactggtgctgttgtgacggagagccagacgtacaaaaaccgagctggtttcttgggtaatgatgattatgctgtatatgtgagagagaatattcaggtgagtaattgtcttaagctggagcctcgatccgtttttcactcagcaaatatttgggtatgtcctatatgccaaacatcagtggacagaggcccctgccctcagggagcctgccttctggtgctggaagacatacctgaccagtgagctcatggtacgctagaaggtgctgtgtaccctggaatgagagagagcagactacagtaaaggggtgggagtgagggcacagtccagggatcgggatctgcaatgagaaggtgagatgggtgcaaagcctacagggtgtgaagggtggctgagcaggatgggcacccagacagaggctgctgtggctgccccggtgtagccagaggacagaggggcagatgggctcaggggcagccggagagcacaagtggcctgtccacggtggacatggcgcagggatggctgttttctactagccccacttgtgacacttcctacatacctttccttgtttttcttatgtaattctcattgccatcaaactttaaaaatctaattatgttttatatagtcctttatctactttaaatcatttcttgtcctaattctcttgttttagtatattttagagaaaatcccccaaatcatctcatttcacctgtatatatgtcagtgagtatcactaataaagaatcttaacataatgacatttctgtttaccagcattacctaacaaaataaataataattccttaatatc

SEQ ID NO: 2116 - DNA, 1600 bp, Homo sapiens
  misc_feature (1)..(1600): DMR15:23433701
ggtgggctgagatcggaaataccacactcacacatgtgaagaataactgaaaacagtaaaacactaaacttatatccaagtatttttttaaattaaaattcttttatgtgctaattttaaaaattattgagatgatttgtgataaaatactgcatgttgtctgtttcagtgaagttaacaggtaacctgttcctcatgtagaccattcccgtcacccggaaagatccctgtgctccttggcacttgcagccaggatactcccctgccctgagattagattcatttttcctgctctgagtgtcacagcaatataactgtatagtatgcactctttcctgctttgccttggagaatgattttcagattcgctcactgttgtgtgcattgcgacttcgtttttattattgggaagttttccattttataggtgtagtactgtttgttagttcattctcctattgaaggacatgtaattgtttttggtttttgttttcttttttttttttttttttctgagacagggtcttgctgtgtcacccgggctggatgcagtgacctgatgttggctcactgcagccttgtcctcctaggctcaaatgatcttcccacctcagcctcctgtgttgcagggaccacaggcatgtcaccatgcccagctagtttttttatttttttgtagagacaaggtgttactatgttgcacaggctggtcttgaactcctgggctcaagtgatccccccaccttggcctcccaaagttttgggattacaagtgtgagccactgcgcccaggctttctggtttttggccgtgtagagctgccacgattgtgctgtgaacaagtactttagtgaacatacgttctccctttgggtaaacacttggagtggaatttgttaggtcctggggtaagtgtgtgttcatagtttcccaaagtggctttgccatttacatttgaaccagtgtgtgtgagaattctagctccttcttgtccttacaaagcagctggatgctgcgtgtgtggggcagatcacattgggttttgtgagagccagtagcagggttaaggattttagggacttcacagaaggaggctggagagcatcagcagaggcagcctggaccttggatctgtaaacagaagacactgtttgaaactgcacaactgagttagggtttccaacaaggcaggtgggggcctgtgggtaggtgtgtgcggcagccacagaggctgggatagcttggcactggggtcagggctcagccagcctatgtgtcttcacacctggtaatgagatcacttgtaaacaatttctgtttatgaattacaggatattgaagccaaaaaagaaggacagaaggaaaaagaaattgatgaacaggaagcaaatgcctcaacatttcatagaaggaggactccattggataaagaccttattaatacggggatctgtgagtcttctggcaaacagtgtttgcctctggttcagctcatacaacagcttcttaggtaaatcatattagctgtattgtattgtgttttatttatttacttttttttgttttttttgagacagagtttcactcttgttgcccaggc

SEQ ID NO: 2117 - DNA, 2700 bp, Homo sapiens
  misc_feature (1)..(2700): DMR15:25171501
tgggccccacccatgaacctgaatgggactgagcctttgagcaatggaccatcccagtggtgcctcggagcctagtcgggggtgatgtggcttcaagggggttgggtcaaggctgagctctggccggtgcctggtagtgctgcaggctggccctgggactcgctggctttgggcaaaggggccagcccgtgtcccactggaggtcaccccttccctgtgggcaactagcaggaagggtggcatccttagctgggaaggcccactgtcgagggtcctgtccagggaatttgcctcccaggcttcttctgatccacggactcacctccagggtggtggggtcttgggcccgaggaaaggagaagataccctgtgttccccagttggctgagtgtggcttggctctgtgtttgggaggtgtgtagggtatgaatggggacccaccagagaacacacatggcccagggccccaggttatgatttcccatgcacacttggagagaactctgggtgagtgccctccactcccaggcacaggctatgcaactgccaggtctgcagtggcatgtggcttccaggtcagcctccttggttggccatgagcaggttggttgccctgtcctgtgcccagtggtcttggagtggcccaggggtcctgcaggggagctggtgtgggtagtggaggtgcttgtggggcctgcaatagagcgcagcctaggtgccttgcacgagctcagtgacccacctgccctgtcctagtcctagctcagtgacccacccccgctttgcagtgatggggagtaccaagcgtctcctgcgtctgtgatgggtcagtgttcccatcacatgggtccatggagggagagcatgcatgagctggcaccacccaccaccttcccactatggaggcgtgaggccatgtttggacacatgtcttcttgtccccccagacagtgagcctggaggaagacttgccctggtcccactgtccctgggccagtgtccatcagccaggtgcccagaccccagtgcgctgaagctcagccctccctggcactctggtctcctgcactgagctgtggtgagcacatccaggtcctgctggatgtttgcatggggaggggctttccccgggttgggtcgatgatgagaagcttctgttttcttgaagagaggtgatgacttaaaaatcatgctcaataggattatgctgaggcccagcctaggtgagaattttggaagaggatgctgggatccccggcaggagggattttgggctggagacctggaggccctgaagggtatctgcaggggccccatccctgtctctgcacttgtctgtgaggcagcccagtttccctgtgtgggcttcgtgtcagtgctctggttccctggagcagggcacgtgggtggctcatccctgaagtcacgttctccctttgtgtctttcagtgagctcttccgcccatgagggccccctggccttgagcagcataggtgagcggatcctgctgggctcatggaccaggccacatggggtcactgagggtcagccttcaggacaggagggattcctcagggagacaacctgaatccccactggtgagggattggttctccaggagaaccacctccttgggaatctgacccaaggaggacaccttccctgaagccctgcaggagtgacagtggtccaggcaggaaagggttccattagtcccatgcagggcagctcccagctgagacttggtgctagggtctggcctcgaggactgcccaggccacatgaggcagggtctcaggctgctatttccagtgcatgcttggagagggagcctgggtaggccccctccctgtgcaggggcaggctgtgcatctgctggggctgcagcggtgcctgccttcaggaccagcctccttggttggcttgagctggatagtggccttggccccacccaggggtcatggtgcagcccaggaattgcaggggagctggcatggggagtggaggtgctccaggggcttgcagtagggcacagcctgggcatcttgcttgagcccagtgaccagcctgccctgttttccagggttcagtggcagggaggaccaagggtcccccacgtccatgactatcactgtttcacatggatcccatcaggtgggtccatggagggagagcatgtgtgagtcagcaccccctgcctcctttcccgcatggaggcatgaggttctgttcggacacttttccctgtctctccagatggtgaccctgaaggaggacttgtgttgggcccaatggcctggggccagtgtctgtcagccaggtgcccagcccctggcgtgctgaagtttgggcccttcctggtgccctgttctatcgggggaacccgcccccaataattcaacgtaggtccttttctattttccctaagtgtcggccggtctgagaaataaagggaaagagtacaaaagaaagaaattttaaagctgggtgtccgggggagacatcacatgtcggcaggttccatgatgccacccaagctgcaaaaccagcaagtttttattagtgattttcaaaggggagggagtgtacaaatagggtgtgggtcacagaaatcacatgcttcacaaggcaataaaatatcagaaggcaaatgagggcagagcaccagggccaaattgaaattgctaatgaagtttcgg

SEQ ID NO: 2118 - DNA, 5900 bp, Homo sapiens
  misc_feature (1)..(5900): DMR15:25240601
cccatggggttgggtcacggagattcaaggattgcatctcacccacggccctgaatgcgaccatccctgttgagcaatgggccatcccagtgggtctcctggggcctggtgtggggtggcattgttttcctggggttgggtcaaggcggagctctgactggtacctgatggtgctgcaggtcagccctgggactcgtgggctttgggccaagaggcagcccgcatcctgctgggggtcgccttttctccgaggttgagtgtcgtgaaggatggcctcctgaggtgggaaggcccactgtcaaggcacctagactaggaattgttcctcaggctgcttgggagccatggtgtcacctccagggtggcgggatcttgggactaagcaaaggaggggacactacgtggctcccaattggccatgtgtggctggctctgtgcctgggaagtgtgtggagtatggatggggacccaccagagaaagcaagtggccctgcagtcccagaatgtaatttctggtgtaggcttggagagggtgcctatatgcatgcccaccatgcccaggagcaggctatgccacttcagggtctgcaggggcacctggcatatgggccagcctccttcgttggctgtgacctgggtggtggcctgtgcttgtgcccagtggtcccagggtagccctggggtcgtgcaggggagccgttttgggcagtggatgtgctctcgggtcctacagtacagcacagcctgggtgttttgctcaagcccagtgacctgcctgccttgtccttcccgggttcagtggcagggagagccaagggtgccccacattggtgacgagtcagtattttgcatggatctcatcacacgtgaccatgaaggacgagcaagcatgagctggcaccagccacccccttctccgcgtggagggtggtcacatgtcctccacctgtgcccccagatgatgagactggaggaagacttccattgggcccacttttcctgggccagtgtccatcagccaggtgctcagcccctggtgtactgaagctccagcctttcctggtgccccagtcttctgcactaagctgtggtgagcacatccgggttccactggatttttgtgcggggagggggttttctacgttgggtcaatgatgagaatcttatattgtcctgaagagaggtgatgacttaaaaatcatgctcaataggattacgctgaggcccagcctaggtgagaattttggaaggggattatgggatgctgaggtcctcagcaaggccactgtattttgggctagagacctggaggctctgaagggcatctggaggtggcccaacctgtctctgcgctcctccatgaggcagcccaggctccctgtgcagggttggtgttggtgctccggttctctggtgtggggaatgttggtggctccttcctgagccctcattctcaccttgtgtctttcagtgagctcttccacccaggagggccccttggcattgactggcataggtgagtggatcctgctggggtcattggtcatgagctagaccgtgtggggtccccgaggttcagccttcagtccacaagggttttctcggggagcagacctgaatttccacctgggagggaagggttctcctggagggtagtttttttgggaatctagcccaaggaggatgccttccctgaagccctgcaagggtgatggtggtccaggcaggagagggttccttctgcccaatgcaggacagctcccagttgagactgagtgctccagtaaggtctccaggactgcccaggccacatgaaggaggccagaggggctatggagcaccactggggtaataggggagctcttggtccctggagtgtggtgtgtgaatggggtttggtcacggagattcaaggatcacaccccacccatggccctgaaagtgaccatccctattgagcaatgggccatcccaccgggtctcctggagtctggtgcagggcgacgttttttccctggggttgggtcaaggtggagctctggtacctggtcatgctgcaggtcagccttgggactcgtaagctttgggccaagggacagctggcatcctgctggggggtcaccctatctctggggtcgaatgtcacgaagggtggcctcctgaggtgggaaggcccattgtcgagggacctgtcccaggattttgttgctcaggcttcttctgagccatggtatcacctccagggtgacagggtcttgggcccaagcaaaggagagggcaccatgtcgctctgagttggccaagtgtagcctagctctgtggtgggaggtgtgcagagcatggctggtgacccaccagagaaagcacgtggccctgcagccccaagctgtgatttccagtacatgcttagagagggcatcttgatgtgagcccaccacacccaggggcagactacgtgactgccaggactgcagtggcacatggcatctgggccagccttcttggttggccatgacctagctaatggccctggcccgtgccttggggtcatgcaggggagccctcttggacagtggaggtcctctcagggcctgcaatatggcgcaggctgggcatttggcccgagcccagtgacctacctgccctgtccttccagggttgggtggcagggagggacaagggtgccccatgtcagtgacaagtcagtatttcacatggatctcatcacatgtgcccatggaggacgagcaagcgggaactggcacccgctacttccttccctacatagaggccattttggacacatgttctccacctctctcccagatggtgagacgggaggaagacttgtgttgggcctgctgttcctgggccagtggccatcagcctgttgcccagcccctgaggcgctgaagctcaggcccttcctcacaccctggtctcctgcactagctgtggtgagcacatccgggtcccgctggatgcatgcaagaggtggttggtctcgtgggttgggtcgatgatgagaaccttatattttcctgaagagaggtgatgacttaaaaatcatgctcaataggattacgctgaggcccagcctaggtgagaactttggaagaggatgctgggatcctgagatcccaggcagggccactatattttggggtggagaactcaaggccctgaagggcctctcagggggtgccaccctgtctctgtgcccctctgtaaggcagcccaggctccctgtgtgggcttggtgtctggtctctggttccccgggggcggggcatgttggtggctccttcctgagcccgctttctcccccatgtctttcagtgagctcttctgcccaggtggggcccatggccttacacgacataggtgagtgtatcctgttggggtcatgggccatgaatgaggcagcatggggccatttagggtcagccttcgggccactagagttttctcagggtgcgaccggggagggaacatttctccagtagggtcacttccttggaaatctgatcctaggagcacgcatttcttgaagtcctgcaaaggtgatggtggtccagacaggagagggttccttcagcccaacatagcgcagctcccagctgaaactcggaaggctggtcaggcctcgaggactgcccaggccacatgaggtgggcaacaggggctctggggcaacctgggggtcacgctggagttctccctctctggacagtggtgggtgattgggcccacgcagacaggccccggagattcaggactgcaccccatccatggccctgaatgggaccgaccctgttgagtaatgggccatctcagtggtacctccttgagcctggtagggggagacactgtttcaatgcagttgaatcaaggctgagctctggctggtgcctggtggtgctgcaggcagccctgagggttgtggtctttgggacaaggggtagctcacatcccactggggtcaccccttccttgagattcagtggccaaaagggtgtcctcctgagatgggaagtcctgctgtcgagggacctgttctgggaatttgccacacaggctgcttctgagccacggggtcacctccagggtggtagggtcttgatcccaaggaaaggagaggacaccatgtggtttcttattgaccaagtgtggcctggctttgtgtgtgggaggtgtaacgcaagatgaggacccaccagagaaagcacgtggctctggaggcccccagggtttgatttccggtgtgtgcttggagagggcaccaggttgggcacccaccacgcccagggcaggctctgcgactgccaggtctgcattggctcctggtgtcagggccagactcattggttggccatgagcaggttggttgccctgacccatccccatggtcccagtgtggccctggggtttttcaggggagccggctcaagcagtggaggtgcgcttagggcctgcagtagggaacagcccaggcatcttgcctgagcccagtaacctgcttgccttgtctttccagggtttggtggccgggagggccaatgatgctctgcgtctgtgttggatcagtgttcttcatggattccatcacgtgggtatcccctacccaccttccccttgctcatacgtgaggccctggttggacacatgtccttctcctgtcaccccagatggtgagccttgaggaagacttgtattgggcccccacaggccccaggccagtgtccgtcagcctggtgctcacccccagtgtgctgaagctcagaccctccgtggcaccctggtctcctgcactgagctgtggtgagcacattcaggttccgctggatgcatgcatggagaggggcttgcccttggttgggtcagtgatgagaaccttctattgtcctgaagagaggtgatgacttaaaaatcatgctcaataggattacgctgaggcccaacctaggtgagtatgttggaagaagacactgggatcccgagatctccaacagggcactgtattttgggttggagacctggaggccctgaagggcatctggaaggaggcccaaccctgtctctgtgctcttccttggggcagcccaggctacctctgcgggcttggtgttggtgctccagttccctggggccagggaacattgctggctccttcctgagcccccattcctcccttgtgtctttcagtgaacttttcctcccagatgggccccctggcattgactggcataggtgagtgcatcctgctggggtcatgggccatcagccaggccatgtggggtcgctgaggttcagcctttgggccacaagggttttctcaggcagccgacctgaattcccacctgggagagacgggttctccaggagggcagcttttttgggaattagacccaaggaggatacctgaagccctgcaggggtgacggtggtccaggcaggaaagggttccatcagcccgggcaaggcagctcctagctgacactcggtgttcgggtcagtccttgaggactgcctgaacacgagggggtccagaggggctctgggtgccacgggggtcacatgggagctctcagtccctagagtgtggtgtgtgaatggacccttagggttaggtcttggagataaaaggattgtgctccacccatggcctggaatgtgaccgtccctgttgagtaatgggccattccagtgggtctcctggagcctgatgggaggtggcgttgtcttcctggggttgagtcaaggcagagctctggcccatacctggttgtgctgcaggtcagccctgggactcgtgggctttgggccgaggggcagcccgcatcccgctggagattaccctatctctgagatcaagcgtcatagagggtgacctcctgaga

SEQ ID NO: 2119 - DNA, 2100 bp, Homo sapiens
  misc_feature (1)..(2100): DMR15:25308701
tcaatattgcctttgtgtttagcttatctttttgtgtcacactttgatccccttctcatttcttttttatattttctttgtggttaccaggaggacaatgtatcaacttttaaagttattacaattttatttttttaaatctctcccattcggggattttaggaaggttaaataataatgtaaatgagatacctagaacaatataagcattcaggaattattaactcaattccaatccttcctccacctccacctctttctctgtgagattatagaaaagatgacaaaaaggatgttttctgagccctttaattgttgagaatgatctttgagaaaaagaaaaaaaatgaaagcactaggaatgtacaacagcctggaagtataattaagtgtaaattaaatagataaaagttataagcagaggaaagtatagtagaactcagtatttaaaagagaatcaatgtgaaaattatataaatttatgtaaaataaaactaccagacaaatctgatatccttaggatttttctttctttcatgtgatttctaattgctacatatgacactaaaccattgatctgagctgtaagagaaactggaaattgttctgttatcttttgtaagatttctagaacattttgccctcagacttaaatgccaacgtatttctcacttattgtttactgcttttggatttacatatgatttgattctttcttatctcttatccttacaatgtaattcaaactgatgccaatttaagttcaattgcgtacaaaaactctactcctatgcagctccgccccatctaatttacattattgatgtcgcaaattccatctttgtacatagtttacatattaacatggatttatacatttttatgtatttggtttttaaatcctgtagaaaataaaaagtcaacacaccaatattaaaataatactggtttttatatttgtccatgtgcttacctttatcagtgttctttacatctttatacgggtttgagttactgtcttgtgtcctttagttccaacctaaagaactccctttagcatttttatagggcaggtctagtggtaatgaactctctgagtttttatttagggatgtcttaatttctagctcctgtttgaagtaaatttttctggatatacaattctctgttgattgatttttgttcattttcccttcagctcttttaaatacattatcccactttcttctgccttccaaggtttctattaacaaaattcagcttataatcttattaaagatctcatgtacatgagtggcttctctcttgctgttttcaagattctgtgactttggtttctgatagtttaaatataatgtgtcttattgtgggtctctttggatttatcctagagtttcttggtcttcttacgttggtatatccatgtatttcaagacatttgagtagttttcagccattatttcttcaaacaatctctcctctttggggacttccattttacctatattggttcttttgatggtgtggcaccagtcccctagactttgttcacttttttccagtcttttatttctgcttctcagactcaacagcttcaagtgttctgtattcaagtctgctgactctttcttcttccagctcaaatctgctgttggatccccccttgtaaaatttttaattccattttagtgtttttcaagttaagtatttttattaggttcctttttataatttctttttgttgatattctcattttattacacataatttgtctgatttccattagtttttttctttgttttcctttagctctttgaaaatatttaagacattttaaaagtctttatccaagttcaatttctatggttctgtagagatattttctgccagtttatgttcttcttttccatgggccatgttttcctgtttctttgtatactttctaatttttggttgaaaactgagcatttgaaaatagagccaactttcccagtttctgcagagagtctttatgccacagtattcgttcactgattaactgggtatatctaagcttagggagcagctgagtcaaaagtttaaggtcttctcaggtcttt

SEQ ID NO: 2120 - DNA, 1700 bp, Homo sapiens
  misc_feature (1)..(1700): DMR15:26487201
ggcactgtccaccccgtttgcaatgtgtgaagctcaccactgagcattccacgtgctgatctcccactcattatcttgggggcccatccttaaatcagaacacacagaaagaatgactagattatcttagggaagcctcttctatcaaagttaatgagcaaaacctaccaatgtggaaaaggatacttaaagaaaggagagcgtatgcagggaaataaaactttagtaattataaagctatcattacagcatatccatactatactattatagtattcctataaagaaaatgaaggggaagatactgcatccaggaaataagaacaggatgttgtttaaacaattattaattaaaaaaaggcaattgccaatgtgaatgcacaatgatacagtcaccttggaggacaatttgatattgtcttaaaaaagtaaacatgctcttgccatgtaatccagcaatcatgttccttcatatctactcaaagaagcttaaaacatgtccacaaaaacaatctgtacatatgtctatagcggttttatttataattgccaaccaatatgttcttcagtagttgaatatttaaaaaagtgtggaacattcagacaatggaatattatccagcactagaaactaagctatgaaaaacaaggaggaaacttaaatgtgtatttgtaagtaaaagtagccaatttgaaaaggccacgtactgtatcatggcaactatataagattgtggggaacgcaaaactatggagactgtaaaaagatcagtgtttgacagggattggtggggaatgagtgatgaataggtggagcacagaggattttaagggcagtgccatattcttcacgatactgtaatgatggatacttgtccatataatttgtccaaacccacagaatgtacaagactgaaccctcgtgtaaactatggactttgatggataaccatgtaaacgatggacttgtatggattatgatgtgccaacgtaggttcatcaattgtaataaacgtacccctttgctgggggatgttgatagtgagggaggcttgtggagggcagggaaggtatatgtgaactctctgtaccttaccttcaattttgccatgaacttaaaaccacactaaaaaaataaaggaaggccaggcatggtggcttatgcctgtaatcccagcactttgggaggacgaggccggtggatcacttgaggtcaggagtttgagaccagcctggtcaacatggcaaaaccccgtctctactaaaaacacaaaaattagccagtcgtggtgggtgcctgtaacgccaactactagggaggctgaggtaggagaatcgcttaaacctaggaggtggaggttgtagtgagccaagatcgtgccactgcactccagcctgggcaacagagtgagactccaaaaaaaaaaaagaaaggtaagaagaagttctgataaacaaaaactaagataagatgtgtgcaaaattcagtaaatatgttggaagataagattagaaaagttcccaaacatagaacaaaaagtcaaatatgtgagtaataagaaagaaaagatataaaaaatagagaatcagctcaggagatccaatactcaaaactcaaaaaagactttcagaaagagcacaacacattaagagagtaaaaaatgatctttaaaatcttcaaggaagttttccaaaattga

SEQ ID NO: 2121 - DNA, 1900 bp, Homo sapiens
  misc_feature (1)..(1900): DMR15:27018901
atcttcactgagatgctgtggataggtttaatataatcctcagagacagggaatttgtgtttaaaaaattcttgaaagattatttgtcacgataatcatgatgatgatggtaaaaaacagtactaatcccattgaagtatttgttccctagagtctttttttttttttttttttttttttttttttgagatggagtcttgctctgtcaccccggctggagtgctgtggtgcgatctgggctcactgcaagctctgcctcccgggttcacgccattctcctgcctcagcctcccgagcagctgggactacaggcgcccgccaccacgcctggctaattttttttgtatttttagtagagacggggtttcaccatgttagccaggatggtctcaatctcctgacctcgtgatccccccgccttggcctcccaaagtgctgggattacaggcatgagccaccgcgcccagcctagagtctcttgaagcctcactaccaaaatagaaactccgggaggttgagggtggaaccccggattctctgctttggtgaagctgcagaatcccagttaagtcactcctcactcctattttaacttcctctctgtaaaatgggaacaggaatgctactgcatactgattaaatgcaaactgcttatgacagtgccatgtaataaatcttatcatccttcatctgtggacattagcagagggagagaaggcagaactgaaggaaggttggtgatggggtgtaggggatcctctgcctaatacatcattgtgttcagtgggactcttagtttagggaaaggaaagggacagatgagcccccgttccccacccttgtccccaaaagcaggaaagatggaagggaggttcccagttattggaagagcctcttatgcgttgggggcatgagagttaatgttatttattcatcttctgaaaattcatgtgctgatatttaaataattacgtcatttttactcttttcatgaaaacatagaaacttaagtgcctagggtgatttttaagcataaacattatttgaaaggcagcaaatgcaatattttggcattctattctgcgtttaattccaggggccttaacaaccatagctaaaaatttactgagcacccactatttactgcgttaacagcccggccctccactctcatcttgaattaggttctgttttcagcctctcttccacgtaggggaactgaggcacagagatctgaagaaacttttcgagatgatagagctggtgagcagctgagcccccctgcagtcaggccgcaccctccatgggcatgtcccctcacttgacacgtctgctcagaattcctcagggtctgcatgcctcatcctcactgctggtgtggggcagctctttagggattcccttgcatggacagctgtaaacacctcgacctcttccccctccacctttttgtccttgtcaacacctattggtcctgtagctcttctgttggaatctctgtttctgttgttttctatctctttgtttttgagacggagtctcgctctttcgcccaggctggagtgcagtggcgctatctcggctcactgcaagctccgcctcctgggttcacgccattctcctgcctcagcctcctgagtagctgggactacaggcgcccgccaccacgcccggctaattttttttttttgtatttttagcagagacggggtttcactgtgttagccaggatggtctcgatctcccgacctcgtgatccgcccccctctgcctcccaaagtgctgggattaccggcttgagccaccgcgcccggcctgttgttttctatctctcgcttgtttttgaatgaatgttcatggtttcatttgctctcgcgatgtcactctctactttttcctc

SEQ ID NO: 2122 - DNA, 1300 bp, Homo sapiens
  misc_feature (1)..(1300): DMR15:28510201
ccaaagtgccgggattacaggtgtgaacaaccatgcctggccaaaaataatttttttaaaaagattttgttctgattctgatgggaaatggactcttttctaaagttactagcagttctttaactggttagctctatgttaggcataggtattactttttagggtggcaggtatgtgaaaaaagaagggaggtggacaaaaccaagacagcagaagtaactatttgagggatttcaaaacctttgactgacactcacttcctgggacagtcttgattttgctactctttcctcatctgtttcttttcaagccttgctccctacacacttaccctagttctaacccttcctgctgatgggcaccccattcacaaggcaacagataccagatgtgaggaatggaaagaaaaacattcttacttgattgttcttaggagttatacagtcaggctcttggttggagggctctgatgtgaaagcttggcttcaagtccactgagaaagtagtatgattgaagtggtgaactggagatggggtgggggtggcctaccacgaggactaatttgttctttacgtgtttttgtttttttatttttttagacaaagtctcactctgtcgcccaggctggagtgcagtagcgcaatcttggctcactgcaagctccgtctccgaggttcatgccattctcctgcctcagcctcctgagtaactaggactacaggcacctgccaccacacctggctaattgtttgtatttttagtagagacggggtttcacactgttagctaggatggtctcgatccgctaacctcatgatccacccgcctggcctcccaaagtgctgggattacaggtgtgagccactgtgcgtggcctgttctttatctaatggtttgcaagggtggaaatacctctggggaaatgtgatggattctcctaggaaactgacttcaccaaataattcttttgaaactgttcagaaacgagacaaatgacatgaatctatttacaaagagaattacctctgtgtctgtgacccaagaggcattcccatagtgatacacttggacatttgttcagggggcaagcgctcacgccgagtgatttttcttttttcttttcttttcttttctttttttttttgtttgtttgtttttaagactgagtctcgctctgtcgcccaggctggagtgcagtggttcgatctcagctcactgcaaggtccccctcccgggttcacaccattctcctgcctcagcctccccggtaggtagctgggactacaggcgcccaccacc

SEQ ID NO: 2123 - DNA, 2000 bp, Homo sapiens
  misc_feature (1)..(2000): DMR15:28542301
gactttatgttttagatgtcttttcatactgtttattttctgttttttgtgttttttttgtgtgtttttttttttgatacggagtcttgctctgttgcccaggctggagtgtaatggtgtgatctcggcactgcaacctctgcctcctggattcaagcgattctcctgcctcagcctcctgagtaactgggattacagatgttcaccaccacgccggctaatttttgtattagcagagatggggtttcaccatgttggtcaggctgctctcgaactcctgaccttgtgatccctccgcctgcctcatcctcccaaagtgctgggattacaggcatgagccaccacgcgtgccctaattctgttttatagtcattttctcttaattattcagtctatttacatttattgtgattgttggcatagtttcttttataactttcatcgtattttgtgctatttgttccatctgtttttatttcttcatgtcttttttgtctcgtttttgctaattccttttatattcatggttattctgctcttgaaatgtatgctatgtgaatatatttgtgagttgacaatactttattagcaattaaatatactatttctctttttttttagaacttgctcaaatgttacataacctcaatatccttagtatctaaattaaactgactttctgaacaatcatcattttaaggcagttaccacgatctactaaaaaataaaaaaaaattagccgggtgtggtggtgggcgcctgtaatcccagctactcaggaggctgaggcaggagaatcccttgaccctgggaggcagaggctgcagtgagccgagatagcgccactgcactccagcctgggcgacagagagactccgtctcaaaaaaaaaaaaaataataataataataaaggaatttaaaaaaagactgggtttaaccatgttgcccaggccggtctggaactcctaggctcaagcaatcccccacgcttggccagtccaaagtcctggaatcaaaagcgtgagccaccacgccaggccgatcacgcctgtcatcccagcacttggggaggcggaggtgggtggatcaccggaggtcaggaatttgagaccagcctggccaacatgatgaaaacccgtctctactaaaaatacaaaaaaaaaaaattagccgggtgtggcggcaggtgcctgtaatcccagctactcaggaggctgaggcaggagaaccaccaaaacccgggatgcagaattcgccgcgagcggagacccagccactgcactccagcctgggcaacaagagggaaactccgcctcaaaaaaaaaaaaaaaaaataataataagagacagattttcaccatgttgcccaggcaggtctggaactcttaggctcaagcaattccccacgctcggttgtccaaagtcctgggatcaaaagcgtgagccaccacgccaggccgatctatttctttctgattaataaattgggccaggagggtggctcacgcctgcagtcccagcaccccgggaggccgtggcgggcggatcacctgaggtcgggagtttgagaccagcctgaccaacatggagagacctgtctctaccagaaaaaaaaaaaaaaaaagagccgggcatggtggctcccgcctgcaatcccagtcactcggaggctgaggcaggagaaccacccaaacccagaggcagaggccgcggggagccgacaccgcaccactgcactccagccctgcaacaagagggaaactatgcctcaaaaaaaaaaaaaaagagagagagagagagagaccggttttcaccatgttgcccaggctggtctagaactcctaggatcaagggatccgccacgctcggcccgtccaaactcctgggatcaaaagcgtgagccaccacgccaggccgatccttcctgtcatcccagcactttgggaggccgaggtgggtttacctgaggtccggagttcgagaccagcctggccaacat

SEQ ID NO: 2124 - DNA, 200 bp, Homo sapiens
  misc_feature (1)..(200): DMR15:28645201
taatttatgtttctaggaatgtgtccattttatctaggctattttatttgttggcatacagttgttcacagtgttcttttataatcttttttatttttatgttggtagtactgtctccacttacatttctgatgttagttatttgcatcttttctcttttttttctttttttttttttttttttgagatggagtctcact

SEQ ID NO: 2125 - DNA, 1200 bp, Homo sapiens
  misc_feature (1)..(1200): DMR15:28784501
aatcagacaggaatagatcggcctggtgtcatggctcgcgcttgtgatcccaggactttggacggctgagcgcggtgaatcgcttgagcctaggagatccagacccgcctgggcaacatggtgaaacccgtttttgtttttgttttgttttcgaggcggagtttccctcttgttgcccaggctggagtgcagtggcgtggtctcggcttcccgggcctccgcctcccgggtttgggtgattctcctgcttcagcctcctgagtggctgggattgcaggcgtgagccaccatgcccggctacttttttattatttatttattttggttgagatggggtttctccatgttggtcaggctggtctccagctcctaacctcgggtgatccgccggcctcggccttccggggtgctgcgattgcaggcctgagtcactgcgcctggcccgaaacccagtcccttaattgaaaaacaaaacaaaaaccacaaagattagcggggcctggtgggcccggcgggtagtcccagctactctgaaggctgatgtaggaggattgcttgagccggagaggggtgggggtgaggtggcagtgagccatgttggcgctgctgcagtccaaactgggcgatagagcgggactgtgtctcaggaaaacaggaaaaaaaaaaaagaagaaaaagaaagtacataaaattgctaaatcaaggaacagcttgacagtatattattgagagaaatagaggcaaaggcgagcagacaccaatgttcacttagtggaactgcagttgtccccagacaggaggctgctacttttccaaaagaaatctattattgacaaaaaaaaaaaaaaagggggtttgttacaatatacaaatagctaaactttatatagccacgaccctcttgcagcactgctctaagccttttcctgctctgaaatagctactattgttacctccattgtagagaatacagatgccagaggttgttgtggaaggaccatggaaactgactaggaaattgacttgtaagtttaggacttaaaggttcttcctgttttgctccttacattgccacattttagttaacatacctcctaaaatactggtcctttctatatttggagggactcgtcttgcagtttgaagttttttcttgcactaagcatttggtcagaagatcatgtgcgttttatgtcagtt

SEQ ID NO: 2126 - DNA, 200 bp, Homo sapiens
  misc_feature (1)..(200): DMR15:29662101
ctggggaggctgaagccagaggattgcttgagcccaggaggtggaggttgtggtgagccaatatcgtgcaaccgcattccagcctgggtgatgggagtgaaaccctgtcgcaaaaaaaaaaaaaaaaaaaaaagaaagaaaaaagaaaatgaaataaaatacagctgcataactgaggctcacaaagctactctgccatg

SEQ ID NO: 2127 - DNA, 1700 bp, Homo sapiens
  misc_feature (1)..(1700): DMR15:30830801
ttttcctatttgtcttaaggtagcatctactgtgtttatttgattttacactctgttttagtctccattggaatgtagttttgttttcattgtaattctgtcttcagctttatttagtttcttcattttcctaagtctgatttatgtggttctttcacgtcttgtatcatttttctaatttcactcaatttcttttgagatgatagattatagggttgacatgttttgggggcatatctttctggcctgcttttattgcctatagggatgttattttgttccttattctcactttgttttggagacacagtcttgctctgtcacccaggctgcagtgcagtggcatgattctgactcactgcagcctcgacctcccaggctcaagccatccttccccatcagccttctgagaagctgggactacaggcttgtgccaccacgcttggctaacttatttttattttttgtggagacgagtctctctatgttgcccagtcttgtctcaaactcctgggctcaagcgatcctcccagctgggcctcccaaagtgttgagaattacaggtgtgagccaccgtgcccagcctattccctttttctaacaataactttttattgtatttggtcttatacttgtatcttgctcatttttatgtgaaatcatttttcttgaacttttagaatgaggtgagattcagaaaagctttgtcactttgtcacctaggttggagtacagtggcacgatcttggctcagtacagccccaacctctgggctcaagcgattccccttccttagcctcctgagtaactgggactataggccgtgcccagctaatttttaaaattttatatagagaaaggatttcaccatgttgtccgggcctgtcttgaactcctgagctcaagcgagctcctgcctaggcctcccaaagtgctgggattacaggcgtgtaccactacatctggctcagaaaagcatttttaaactttaagctattacttcatgatagaaatttaaagaacaaaaggtatttctagtcagcatttgcctagatgaaaatcttgtgaccctttttctcttctgtttctctctcgctttatatccagtccaccagcaaatcctgttttctctgcttttaaaatatattccaaattcaaccatttttccctcactctagacattctgggctagagcaccgcggggtctcacccagtttatcatcctagcaaccacatactagctgcctccctgtgttcctgcttccactccccacctcctgcggcccccccagaatcagctcccaacagagcatgcagagatagtatcttaaaaccagtccaagcctgtcaaccctgtaaccgtaagagaggacctgagcccctgccccacgtccctccttcttccctccttcctcccctgcctctttcccggcctctcagtgccatcctctgctagatcttccagcctgaaggaaaactcttgtgcctctgctcgcacacctctcacaccagatgtgcgggttctccacaccaagcggttctccagttctctggacacgccagaagttgaggtgctcctcacctccaatgccgctcactccccaggtgacccacagctgccatctgacttggctgcacactgggcattcccacagcccctggtcagtgtgatgttcgctgtaaagcttgatcaggggagt

SEQ ID NO: 2128 - DNA, 1600 bp, Homo sapiens
  misc_feature (1)..(1600): DMR15:31663601
aaaggacatgatctgtttcctttttatggctgcatagtattccatgatgtatatgtaccacattttctttaaaaaatttttatttttccataagttattggggtacaggtggtgtttggttacatgagtaagttcttcagtggcgatttttgagattttggtgcacccatcacctgagcagtacacacagaaccctatttgcagtcttttatcctttgctcccctcccatccttccccccaagtccccaaagtccattgtatcattcttatgcctttgcgtcctcatagcttagctcccacatatcagtgagaacatacgatgtttggttttccattcctgagttacttcacttagaataatagtctccagtctcatccaggtcactgcaaatgatgttaattcatttctttttatggccaactagtattccattgtataaatatactatagtttctttatccactcattgattgatggcatttgggttggtcccatgattttgcaattgtgaactgtgctgctacaaacatgcgtgtgcaagtatcttcttcgtataatgatttcttttcctctgggtagataccaagtagtgggattgctggatcaaatggtagctctacttttagttctttaaggagtctccacactgttttccatagtggctgcactagtttacattcccaccagaacattccctgttcaccacatccatgccaacatctactgtttgttgattttttttttttattacggccattcttgcaggagtaaggtggtattacattgtggttttgatttccatttccctgaccattagagatttgagcattttttcatgtttgttggccatttgtatatcttcttttgagaactgtctattcatatccttagcccactttttgatgggatttttttttcttactgatttgagtttgtggtagattctggatattagtcctttgtcagatgtatagattgtgaagattttctcccactctgtggggtatctgtttactctgctggctgttccttttaccatgcaaaagctctttagtttaattaagtcccagctatttatctttgtttttattgcatttgcttttgggttcttgctcgtgaaatccttgactaagccaatgtctacaaggggttttccaatgttatcttctagaacttttatagtttcaggtcttagatataagtcattaatccctcttgagttgatttttgtataaagtgagagatgaggatcctgttccattctcctacatgtggccagccaattatcccagcatcgtttgctcaaaagggcatcctttccctactttatgtttttgtttgctttgtcaaagatcagttggctgtaagtatttgggtgtatttctgggttctctattgttttccattgctctatgtgcctatttttataccagtaccacgctgttttggtgactacggccttatagtatagtttgaaagcaggtagtgtgatgcctccaaatttgttctttttgcttagtcttactttggctatgcaggctctttttttggttccatacgaattttagaattgctgtttctaattctgtgaagaatga

SEQ ID NO: 2129 - DNA, 1500 bp, Homo sapiens
  misc_feature (1)..(1500): DMR15:34097301
gggattacaggcgtgagccactgcgcctggccggttttctgttctttttaacaaataataaaaggtatttaagtaccatttgttctatttgctataaataattcccatttactttggttactagaagcttaaaatgtttatgtagttaaaaacatccatcttttccttactgatttcttctaaacttcctagacttagaaaaccatcctatcaagagctgataatttcatttcacagatcaaaattaatttgtttgaaaaatgagaaactactattctgaggggggaaaaaaagtttatgtttcaggaaaacaaatggttctaaaatgaccaactgtatcagagaattcccgatatcataataatatattaaaataatgcttcttaaatcctcataggctctttcatagttaaaggaataactgatactgatgatatccacaacagttactaaaaagcaagatgacgagaccatcctgactaatacggtgaaaccctgtctctactaaaaatacaaaaattagctgggtgtggtggcatgcgcgtgtagtcccagctactcaggaggctggggcaggagaatcacttgaacctgggaggcggaagttgcaatgagccgagattgtgccattgcactccagcctgggtgacagatcgagactccgtctcaaaaaaaaaaaaaaaagtaagatgaaaaagtgtcactccagagcacactaagccagaattgaaatgtaaaaaagttaacttatgcctggcctggacatgttccatttgccctctagatccactctctacctttctcctctttgcagactggaggaaggaaagaaaatgagcttagtctattttccccccagacctctcactgacaggccacctctgactggctgtgttaagggactggtttgtgtctttcaatgcaggcctttcttcccttcaaggttccagtaacctctactctcctcttccttcaggattagaggtggtgataataaccttgaggatgtaagctccagggtactgcacaatctggctgtttcccaacaccatgactacactgtttgatgccttcattaaattatccttgaattactctaatttgagtgcatcttctacttcttaatgggaccctgactgaaccaatttctttctttcttttttttttttttttgagacagagtctcactctgtcacccaggatggagtgcagtgaggtgatctctgctcactgcaacctccgcctcctgggtttaagtgattctcccgcctcagcctccctagtagctgggattacagactaccgccagtatgcctggctgattttttttttttttttttgtatttttagtagagatggggtttttccatgttggccaggctggtctcgaactcctgacctctggtgatccgcctgcctcggcctcccaaagtgctaggattacaggtatgagccaccgtacccagccctgactcaaccaatttcaaaacattttttcag

SEQ ID NO: 2130 - DNA, 500 bp, Homo sapiens
  misc_feature (1)..(500): DMR15:35244801
gggataaggagacaaaattctaggtaagggcctatgagcctacgagcttggtaagtcaattaaactttttggaatttgattttcttatttgtaaaatgtggggatttaactagatggctttgaaggctccttccagctacaatgttttatgatcatgtaactaccactgataggtagaaacatcacgaaagaatctgacactcatgaaaaatgtagacgaaagtcattacacttttagggggaggctattcatgctacatattgttagtgtgatttaaatatgaaccacatgcccactcaggaaaaaaaaatgaacaatttatacaagaatctatcaatcattcatgattctatgaaatcagaaacaattctctaatacgtatgtagtttaggggcaaacatttataaatatttctgggtcattgttcttgcttttttttttttttttttttttttgagatggagtcttgcactctcgcccaggctggagtgcagtggtg

SEQ ID NO: 2131 - DNA, 700 bp, Homo sapiens
  misc_feature (1)..(700): DMR15:35328101
gcaaacctatatatatatataaattaatgagctccatatttcctcattgtgaaaaggtagagtctatcatagcctctaccactattttcaggtcctctgtgtcatcatactttctcttgctcctaggctttaaaatgctattaattatccctgacaggccccgtttttctccttctttctgccatcttaacctggtaacccctttgacacctggaatgcaaaaatctgagttaggtgtatttctttctctttccctttttgtctctctctctctctcctctactttgtataattacatgtattttccctgctagactctaaacgttgtgagtacagaaaatgtctattttattctctgtaataaatccagcaactagcatagtacttgacacagagtaggtgctttaaaagtattgctaaataatgttatggaaagactggatatggctgaccaaaagaagaaaaggtgataagagaacaaggtactacgaggaaataaagactcaaattatttatccaaaaagataatgtgaaattatgtaaaactaaagaagaatccttgtcacaattcttaatattgagaagttttaaatgaattgttccaaataggtaggaaaataatgtcattagtccaaacaaagacacttccttatgggtcagtgtattagtccattcatgctgctgataagttgccagagac

SEQ ID NO: 2132 - DNA, 1700 bp, Homo sapiens
  misc_feature (1)..(1700): DMR15:36824701
aagtatttatagcaatgttattcacgaatgccaaaaactggaaacaaaccaaatgcccaccatcttctgaatgaatacacaaactgtggtacatccatatgactggacacaactcagtaataaaaaagaaccaaccacagatgcataccccaacatggataaatctcaaaagacttatgctgagtggaagaagccagattcaaaaggctatatactgtatgactccatttatacaatattctggaaaaggagaaactgtaggaacagaaatcaaagcaataattgccaggggttgaagatgtggtggaggggaggaaactgactaaaaagaagcatctgagaactttttaaaatgttgtaaatattctccctcttaattctggtggttgcacactgtataaatgtgttaaaatcatagaacgctgtgtgccaaaaatgagtgaattcatagtaaattaaacctcagtaaaacaccaaaaagtcaaacaaatgtaaaattttaaaaatagatgattaatagtttcaaatgaattcttcaaattttagtaatgttctgacagttataagttaagcttttttaatgcaattcattatatataaaatgttatctatattaatttattcatactaactccacttgaaatatgtatattcaatacattaaacaataaaggcaaaatggtctaagggccaaaatgtaaaagagtaagctgtattcaagacaaccagaaaaagcaaaatatatatcttgctttaaagtttcagaaaaaaaagtcattcagtacagttcaacaaatatttattcagcatatattgtctcaatctgtaaaataggcagctttgcacattttaatggccccaaagagccgtactgaattctcaaatctacattactttaaagtaagttagaaaataccttgatgatattacagaatccactttcttagaataatacctggcccataatatgcaaatatatgcattagctatcttattatttaaatttcttccactcaccattattatgcaagtttaataatatctgttgaagttgcttttgttaatgcttacccagcagccactcatcaccactgccacactttctttctgccccaaggtcactttcatttaggtgttccctgtcccttagatggccatgtactttctcaaaggaaaagaataccaatcccagccccaagggacatgtcatgattagtataagccagtcatggcgccctcctttccttaccattaactggtgtagcgcgggcatatgatgcaaattggatgaaaccaaatagaaagtcttctggagggcttctgggaaaggtattctttgctgattaagaaccacaaagggagaaacaacctctcttctaccatttgtggtagcctctggataaaatgtgggaactgctacagcaatccagcaaccaggagcagtgctagactgcagaagagccaactcactgaaaatgacaaggcagaaaaatgcaagaagcctggcatggtgcctcctccctgtaatcccagcactttgggaggccaaggcaggagggttggttgagcccaggggttcaagaccagccagggcaacaggaggaaatcctgtctctccaaaaaaaaagaaaaattagctgagcatggtggtatgcgcctgtggccacagctaccaaggaggctgaagtgggagaatcaac

SEQ ID NO: 2133 - DNA, 800 bp, Homo sapiens
  misc_feature (1)..(800): DMR15:36973701
taatgacgttcaaataagaagttaaaatattaacactaaaaaactgtaactgaacttttaattaaaaaaaccctaaaaactaatgacattgttttcttcttatttaaaaaaaaaagccagtattccacttgaaatgttcgtgagatatacaaatccactgatttccaaaattaaccttatgatatttaaagatgatatatgccttgttgtctatggatacctgccagaacttgtacttacgtatttctaaacacttaattcagcaatatttcacatcaatttccccctcgatttttctagctatcatgccttgagagcagttcctatctttgaccttgaaaactctcaataaaaatcagtcacatttccatttcctagaaattcgaagagtgtcaccaaactttcaggtacagataaattcttgtctggttatcctgtattgtgaaatgccagctcttcattatttcagaacattctatatcagggctgatattgaatctataattttgtgttttaaaacaccaaacatcatagtgaaattcaaaaaatgaatttcagaattctgagtgttcatatttcaagctcctacatagttcgtttattttttctttccatcgagccacagaagttgaccccagtaagaccattaagtccactgatttcattagtaatatttttgttcacactccaaaaatcaaattgttcatattccaaaaattaaataatttggtttatcaacatttcaatgattttccatattctcccaaattatttgagagctatgacataccacgttaaca

SEQ ID NO: 2134 - DNA, 2800 bp, Homo sapiens
  misc_feature (1)..(2800): DMR15:39012201
aagacccagaaaattctcgtgaatccagaaaagctcttttggttcttttgcagtcaattatccccaaccacagctcatactaatagacaaaataaggggaaaacataaattaatctcaatatatattttcaaataatttgacaaaatgtaatgctctttttgaataaaattcttaccaaactagagagagaaggaaatgtcctcaacttaataaagggcatctgtagaaaatctagagctagcattacacttaatggtgtaagactgaatactttccctatatgatcaggaaacagtcaagggtgtttattctcaccactttcgttcactattgtattggcagctctggccagcataacaaggcaaaaaagaagacttaaaatgcaaataaattgaaaactaataaacaaaatgatcgtaatttgcagacatcatgattatttctgtagaaaatactttggaatctatagaaatagcttctagaactaataattgggtttaggaagtcagcaagataaagataaatctatagaaataaatattcctccatactattcaaaatcagaaattaaaatttaattggtaaacatgttgtcattaaacagtatatagaagtattgaaactactgcttaaagctagtggagcctcggtttcacgggctcaattaagggacctaatgcaaactgttgtattccataacccatggttcccagaagaaggtacgctagatgtagagctctgggaacaagtggggagacatcttaaacaacatcatgcacaagggcaatgggtcccagtatcatctctaacgctatggactttagttagggcggcccaggtcccgttatacacccaagagcctaaaaaggggaaggaggaagaaccgtcacctaccttcccgcctccatctccctcagccccattgtttccaggcaaaaataacaaagaagaaatggaggttttgcctgagccccctcctccaataaattggataaaagacaagggatacactacagctatgggaccctgtcttaggcaagcggcattagaaggggagctcttagcctgcctggtaatgcaagatcaacaggcaatcaggtatataaacccatttcttttgatgcttataagaagatttttaaaaaggcattagaggccggagccacgcagccaagtgggctatgggcggaagaaaaggctcaggggcagggaagctcacagtgcctgggcccacagggtctggccggccggcagcagccacctggcggcagtgggagagaatggcgcagacagaaagtcgcgcctaagcgagcacaatgcagctgccaccctgggacccacaccgctgtgctctgcaggtggcccacagcaaaatttcatgtgttccttgtatacaagtgacgtcccagattataattctctgctaaaatttaagtaaaatttaagaatttgaaaaacccttttctaataatggccactgttatttctcccttacccctaaggtgactctcttcaagtccaatttaagtaaaacagtaacctctgaagggagagaaattaaagagcccatgaattagttgaggagcaattaaaagccggccatatagaaccatcaaacagcccttggaattagctcatttgtgtcattcccaaaaagtctggtaaatggagagttttgcatgacttacgtgctattcatgctaatttgcaacctatggggccccttcaacagggccttctatccgcggcggcgattcctcgagatggcctataatcgttattgacttaaaagactgtttttatactattcccacagcagaacaggacagaaaaaaatttgcctttacgataccagctatcaataatgagaggccaccttgctgatttaattggaaagtgcttcctcgggggatgctaaacagtcctaccatgtgtcagtattatgtaaagcaagctttgctccccagtggaaaagaatttcctgactgcaagattattcattttatggatgatattttattagcagccccaaaggtgacagtacttgtaaacttatatacctctgtcgtaaagaatacatacctaagaggtttaatcacagcatctgaaaaagtacagatgtcttctctttggaaataacttgggtacatactaacttcccagtcagtaagaactcaaaaggttaaattaaatactagcaacttatgcaccttaaatgattatcaaaaattattgggtgatattaactggctttgccccatcttgggcatatctactgataagttgcaagaagttgcaaaacctgttttctatcttaaagggcaatatagccctggattctcccaggtatttgaccactgcagcaaaaagggaaattgaagacatagagcaagctatttcccaaaggcaaatggattgcatggacactcaatattctgtccagttgtttattttccccactaaacattcccctgcagggttaataggacagatgagcccaggactgcactttttagaatgggtttcttgctcacatactgggactaaaacactctctccctatatccagctacttagtaaagtcatctattcaggctgcagatgatgtaatcagttgctaggttatgaccctgatgtcataagaattcctttgagtcaaaggcaatttgaagcagtattgcccctctctttagatcttcagataccactcactgatgacacaggccatttagaacataccctccctactgacaaactgcttcagttcttatctcgtactcctgtaattatgcctacaaa

SEQ ID NO: 2135 - DNA, 600 bp, Homo sapiens
  misc_feature (1)..(600): DMR15:39172601
gtcccacatcagtagcctggaagccacagagtaaccccagacccctgactcccggtccctttgtcctctgaggagcttctcggtcagggccctcatcccaaattcagccttgttgacctttttcaaactcagcactgaaaggcttcaagggcaacaggaagtccccagggaagggcagcatcacctttaggggctgctgctttactggctctgtgcacagagagttctgcacatggaatgtggacactacatgtttctgagctgctgcagctgctctgaacaaacggactcccccactcccggggaatcgaaactacacagtttcactctgtcttgttgtgttgtcagctggctttcagcattcccttgtccccacagaaacctctacatggatcccttgcatgggtgttgtacaatgggagctttcattcctgctttggcacctgcaaccctgggttaacagtaccatggagcggagaaagcgtttaccagagtgcggtgccgcgatcccaccccgtgcagcagttgagcagaggcaagtagcagggctatgtgtgcctgcagggaaggaggggagatgaatcatgggagaaccattcc

SEQ ID NO: 2136 - DNA, 500 bp, Homo sapiens
  misc_feature (1)..(500): DMR15:41203901
agcaagacttctcctcaaaaaaaaaaaaaaaaaaaaaaaaaaaaccctaaaaatattactctaggccaggtgcggtggctcacacctgtaatcccagcactttgggaggccaaggaaggaggatcacttgagctcaggagtttgagaccagcctgggcaacacagtgcaaccccatctctactaaaatacaaaaaaaattagccaggcatggtggcatgcacttgtagtcccagctactcgggaggctgaggcaggagaattgcttgaacctgggaggcggaggttgcagtgagccgagatcatgccactgcaccccagcctgggcgacacagcaagactctgtctcaaaaaaaaaaaaaaaaaaatcagccaggcacggtggcccacgcctgtaatcccagcactttgggaggtcagggcagttggatcacctgaggttgggagttcaagaccagcctggccaacatggtgaaaccctgtctctactaaaaatgcaaaa

SEQ ID NO: 2137 - DNA, 1400 bp, Homo sapiens
  misc_feature (1)..(1400): DMR15:41286701
tggttttatttaaataaattttgtgtatatttcaggtatacaacatgatgttttgggatgcatatagatagtaaaaaggtttctacagtgaagtaaattaacatccattgtctcacatagctattttgtttttgtggcaacagctaaaatctcatttagcatggatcctgtttacagtataattttattacctatagttgtcatgttgtacattagatcgttagacttgttcagcctacgtacctgttcctttatattctctgacctatatctcttcctttactaactcccacatcactgttttgttctctaactctgtatatttgattttttaaaaaaatttcacatgtaaatgagattgtgcaatgtttttctttcagtcctcctgactcatctatgctgtgacaaatggcaaaatattttgtttttttttttttttgagacagtcttgctgtcttagcacttgctctgtcactgcactcaggctggagtgcagtggtgctatctcagctcactgcaacctctgcctccctaattcaagcgattcttttgcctctgcctcccaagtagccaggattacaggtgtgcgccaccacgcctggttaatttttatatttttttagtagagacaggatttcaccattttggccaggctggtctcaaactcttgacttaatcccaaagtgctgggattacaggcatatgccactgcgcctggccaagatctcattcttttttagggctgagtaacatatgccatcatatatatgcactgtagtttctacagtttatccattcatccattgatgatggacagttaggttttttctgtatcttggctattgtgaataatgttccactgaacataggagtgcagacatctttatgaagtgatttcatgttttttggttatatgcccagaagagggagtgctgggttatgtggtggttccatttttaatttctttagaaacctcccagctgggcgcggtggctcatgcctgtaatcctggctactcaggaggctgtggcaggagtatcgcttgaacctgggaggcggaggttgccatgagccaagatcgcgccactgcactccagcctgggctacagagtgagattccgtctcaaaaaaaaatttccatactgtttttccatagtggctgttctgatctacactcccgcgaacagttaataataattcattcttctcttaaacgaggcaaattttggaatatatttatttaattttttttttgagacagagttttgctcttgtcgcccaggctgaagtgcaatggcgcaatctcagctcactgcaacctccgcctcccgggttcaagcgattctcctgcctcagcctcctgagtagctgacattataggcacctgccaccacgcccag

SEQ ID NO: 2138 - DNA, 2100 bp, Homo sapiens
  misc_feature (1)..(2100): DMR15:42802201
ctttggttgacagtgatggtggtgatgcctccactggccccaccatatcctgcacccaggccaccccggaagctgctgctgcccattcgggagaagctcgaggagctgatgcaggcaccaggcccactcgtgtaggagaggctgttaaaggcctgggggccagaggtggacaccttgtaggacttccgggtcaccctgatggacatggtggaggcaggcgggccgaaccagacggaatcccagaaggagtggagaagctgcttcttggtctgcacacagtctttacttctctgctcttcttggggattttagcaacattggtaaagaaaaaaatttaactgcacccatcctctaacaaactaaaccagcaaaaataaaataaaataaaataaagagaatgagttgaagaagctgcaacctttacctgttttcaccattaagtcgggtgtcacatagcaacggggatacattctgagaaatgtgtcgacaggcatttcattgtgcaagcatcatacagtgtactgtgatggttaatactgagtgtcaaattgactggattgaaggatacaaagtattgatcctgggtgtgtctgtgagggtgttgccaaaggagattaacatttgaatcagtgggctggggaaggcagacccatccttaatctgggcactatctaatcagatgccagtgaatataaagcaggcagaaaaatgtgaaaaggtgaggctggcgtagcctcccagcctacatctttctctgatgctggatgcttcctgtcctccaacatcagactccaagttcttcagttttgggactcagattggctctccctgctcctcagcccgcagacggcctattgtgggaccctgtgatcatgtgagttaatacttaataaattcccctttatatatatatctctattccattagttttgtctctctagagaaccctcactaatacatgtacttacacaaagctagatggtacagcctattacacacctaggctatatagtatagcctattgctactaggctacctatctgtgtagcgtgttattgtactgaatactgtaggcaattgttatgcaatggtaagtatttgtgtatgtaaacatatctaaatatagaaaaggtatagtaaaaacacagtattataagcttatgggaccactgtcgtatatgcaatccatcattgactgaaatatcattatgtggcacatgactgtatattaagatactggagattcagaagtgccccatgtggttggctgccccaggacctgaggcagggtaaggcagcatggtcacttactcagccaaaagtgctggatgatatcagtcttccctttcaggggctcagtcagtccaaaaggtaaactgcctggaaatatagtacactaaggcttttcagtgcctcctcacaaggccaataaaaaaggtaaacaacattttcttattgctgtgacaggacaaagcagcaaagaggaaataaaagaagttctattaacatagaaggtaatgctgagtgaagaaaaatgagatgattttaggcagggtgcggtggctcacatctgtaatcccagcactctggtaggccaaggcgggccgatcacctgaggtcaggagttcgagacctggccaacgtggtgaaaccccatctctactaaaaacataaaaattagccagatgtggtggtgcacacctgtggtcctagctacttgggaggctgagatgagaggattgctttaacccgggaggtggaggtttcagtgagccaaaattgtaccattgtactccagcgaggagtgcaaaaaaaaaaaaaaaaaaaaaaagagagagatgattacaagcaaatgcagcatcactgtggtacatgtaaaactacttacatttcttacatttacatgatactttaaaatttataaattattatcataattacctcattaaaaatattaacaatggccagttgccatggctcacacctgtgatcccggcactttgggagactgaggtgggcggatcacctgaggtcaggagttcgagaccagcctgaccaacatggtgaaaccccatgtctactaaaaatacaaaattagct

SEQ ID NO: 2139 - DNA, 200 bp, Homo sapiens
  misc_feature (1)..(200): DMR15:42883301
cagaaggtggaggttgcggtgagccgaaattgtgccattgcactacagcctgggtgacaagagcgaaactccacctcaaaaaaaaaaaaaaaaaaagtagaatggtaaagggactcatgtaaagggactcaagattgcggttaggtttctgcgttattttaggtaatgtaatattcatattatgtaatatttatataaca

SEQ ID NO: 2140 - DNA, 3000 bp, Homo sapiens
  misc_feature (1)..(3000): DMR15:43270301
tctgggaacagttgagaggattttggagcaatcaggcagtcactctgagtaaagtcccttgagttgtgccagcctgagtggctgaactcttggcagctttgcccatgccccaaccttgaggagagggcagggaactcacacccattgtggagggcctgggcctcccccaaaagacctcacatgttcaggagcacttagagaagtcttgtttaaggtagccactggacaagagaggaggcggaagcaccgcaggggcacgaagcccattcatagggtcaggaaaaccctggccagctcctctgcctggaccgtagggctgaataagacctgggctctgggcctagggagctggtttataggttcagcccctcattcgatttctgtgagccattagtcagagggtatgtgggtgagggtgctggggagagggaggcagctctgatagagcagcttgtccctcagcacaggggaggggacagggagagagagggaggctaagcagggttgatgagcaccttcctgtccggaaggaagcagggctgtgcccacaggggagggacacctgaacagagaagtgaggacacatctgccatccgcatggggcaggccagtgctcactaggtgggggtggagaacctccagaacttcctttttttctttaattttacagatggggtcagacctttctaagacccagagagacttgggtgctgattccggccctgccatgaatttccattgtgcccctgggcaggtgacagtttctttgcctataaaatcagaggctgtgacgggctggatgcctgggtctgagggagggtgaggaggtgccccacagacgattgcacagggaagccacagctggcagacgccaatggattcctctttccccttcttttctcacccctagaaacagagacagtcaccctggagaagggattaaactggtagagggcctctgtgagtgcacttcacaatttacaaagcacttcaattaaaaaaattttttttaaacttttatttcaggttcggaggtacatgtgcagatttgttacataagtaaactcatgtcaagggggtttgttgtactgattatttcaccactgaatactaagcctagcacccaatagttcttttttctgctcctctccctcctccgaccctcatccctcaagtagaccccagtgtctgttgtttccttctttgtgttcataagctctcaccacttctaagtgagaacatgagatgtttggttttctgttcctgtgtgagtttgctaaagataatgggctccagctccatccacattcctgcaaaagacatgatctcattcttttttatggatgcatagtattccatggtatatatgtaccatattttctttatccaatgtgtcattgatgggcatttaggttgattctatgtctttgctattgtgaatagtgctgcaatgaatattcgcatgcatttgtctttatgatagaatgatttatattcctctgggtatatacccagtaatgggattgctgggtcaaatggtagttctgttttgagctctttgaggaatcaccatactgctttccacaatggctgaactaatttacactcccactaacagtgtatatgtgttcccttttctctgcagccttgccagcatctgttttttgtttgtttgtttgttttttactttttaataatagccattctaactagtgtaagataagatggtatctcattgtggttttgatttgcatttttctaatgatcagtgatattgaacttttattcatttgcttgttggccacatgtatgtcttcttttgaaaagtgtctgttcatgtcttttgcccactttttaatggggttgtttttctcttgtaaatttgtttaagttccttatagagactggatattagatcttcgtcagatgcatagtttgcaaatatttcctcccattctgtaggttgtctgtttactctgttgatagtttcttttgctgtacagaagcatttaagtttaattagatcccatttgtcaatttttgcttttgttgtgattgctttcagcatcttcatcatgaaatctttgcctgatactatgtctaggatgatattgcctagattgtcttccagggtttttatagttttgggttttacatttaagtctttaatccatcttgagttgatttctgtatacagtgtaaagaaggggtccagtatcaatcttctggatatggctagccagttatcccagcaccatatactgaatagggagtcctttccccattggttgtttttgtcagtgttgtcaaagatcagatggttgtaggtatggggccttgtttctgggctttctattctgtttcattggtttataggcctgtttttctaccagtaccatgctgttttggttattgttgccctgtagtatagtttgaagttaaataatgtgatgactccagcttacaaatactttatattttttatgtaaaataaatatacatacttatttatgtatactttatatatacaaatactttatttatttatttatttattattttgagatggagtctcactgtcgcccaggctagagtgcagtggcacaatcttggctcactgcaaactccacctcccgggttcaagcgattgtcctgcttcagcttcctgagtagctgggactacaggtgcacaccaccatgcctggctaattttttgtattttccgtagagatggggtttcaccatgttggctgggctggtctctaactcctgacctcagatgatcctcctgccttggcctcccaaagcgctgggattacaagagtgagccactgtgcccggctgcaaagcactttagaatacactgcctcatttgatcctcacagcaaccctatgagggaaagtcaggctgacactcctattattatgttatcattttacccctgggggaaccagggtcacaccatgagggagtccagagctctttgctttgtatcacac

SEQ ID NO: 2141 - DNA, 2000 bp, Homo sapiens
  misc_feature (1)..(2000): DMR15:43833101
tgggcctttttaatctggaagctcatgtctttagttttgagaaactttaaaataatatttgttttcaaactattattttttagagatggggtctcactctgttgcccaggctagaacacagtggtgtcatcatagcttactacaaacttgaacttctgggctccagtgatcctcctgctttggtctcccacttaacgttatttttctttcttttcttttcttttttttttttttttgagatggagtctggctctgttgcccagagtggagtgcagtggcgccatctcggctcactgcaagctccgcctcccgggttcatgccattctcctgcctcagcctcctgtgtagctgggactacaggcgcccaccaccatgcccggctaattttttgtattttttagtagagatgggctttcactgtgttagctaggatggtctcgatctcctgaccttgtgatctgcctgcctctgcctcccaaagtgctgggattacaggcgtgagccactgctcccagccctttcttttttttttttgtttgtttgttttttgagacggagtcttgctctgtggcccaggctggatggagtgcagtggcatgatctgggttcactgcaacctccatctcccgggttcaagcaattcttctgtctcagcctcccgagtagctgggactacaggcgtgtgtcaccacacccggctaatttttgtatttttagtagagactgggttttgccatgctggccaggatggtcctgatttcctgacctggtgatctgcctgcctcggcctctcaaagtgctaggattacaggcgtgagccaccacacccggcctgccatttatattattttttaataattgattctcttccaatttctcagcagtttctcgaacaatgaattggatattggacctctaagactgagtatttttttgtcttttctgttcatgtgtttatctttttgttctactttctaaatttaagccttttcatggatttaaaaactattgagttcttattttttgaattttcttttcttacagtattttgctatttcctgaatatactgccttatatctcagggttttaaaaaattagcttactgttacattagtggctttttaggagaaagtagagacatgtacttactcactctactgcgtttaagggaagtttttttgttggaaaaaaataactttttttttttttttttttgagacggagtttcgctcttattgtccaggctagagtgcaatggtgcgatctcggcttgctgcaacccccacctcccaggttcaagcgattttcctgccccggcctcctgagtagctgggattacaggctcctgccactatacctggctaattttttttttttttttgtatttttagttgagacaggatttcaccatgttggccaggctggtctcgaactcctgacttcaggtgatctgcccacttcggcctcccaaagtgctgggattacaggtgtgagccaccacgtctgaccaacttttatatttttagtagagatgaggtttcaccattttggccaggttggtcttgaactccagacctcaggtgttccatccacttcagcttcccaaattgatgggattacaggcgtgagccactgcccctggccaaaaataacttttgtgtaatagtacaattaattgccactaggaaataatttgctactagatcatactacttgatttctaatatcagatcacttcttaactgggaagccatacagatattttgggggtatcccaaatccagacttactgaaatatccaattcagcaaacgtctgttttggtaagatgatgaaatgaatagagatagtacaatttgaagtaaagtattcatgtagaaaatgaaacatgtagttttgtgaagtgcttttcctgtagattatataaagtaatggaatctttttggtgtaattttataggatttttcgggattgtcaccctacgaaaggaagagactga

SEQ ID NO: 2142 - DNA, 500 bp, Homo sapiens
  misc_feature (1)..(500): DMR15:44103501
tacagatagatcaaacagctttatagagggataactcatatgccatacaattcatctatttaaagtgtataattcagtgggttttggtacatacataaggttgtgcgacctttgccataatcaactttagaacattttcatcaccccaaaaagaaatcctcccatatccattagcaagcaatcattccccatttcccaacttccttcttccccagtcttggaaaaccattaatctactttctgtctccatggatttgcctatgcagttatgcagctcatacaacattttggtcaacaatggatctcatatatgacagtggtcccataagactaaaaggaagctgaaaattcttattgcctagtggtgtcatagccatcataatgtaatgcgttactcatatgtttgtgatgatgctggtgtaaacaaacctactgcaatgccagtcatataaaagcatagcacatataattatgtacagtaaataacacttgataatagc

SEQ ID NO: 2143 - DNA, 1100 bp, Homo sapiens
  misc_feature (1)..(1100): DMR15:44270401
attatctttgagtgggagaggaaaaggaggaaagacagtggagaggtatcctgcttcagcttcgagaatgctcaggagagctggccatcagtcttgctaggataagttcttcttgaggaataaaaggcaggcccagatgtgaggaacatcaggcatgatgaatgaacctttccaggcccatacctaccattctactactagactaagggaattgtttgtgtcttgttgtaaagctagttgactaaaccccagtaatcttgtttcctttttctttggaatccatatttctgaagcatcagtcatccacctaatactttctagaaataagaaacagtctagacagatgcctgttccttcaaaacgacttcccagagggaagaggaggaggagaaagagaaagtgtaacaaaaagtggggtggtggggggaacatggagaaagatcacactttgtgaatggattatcaaaaatttttttagtatttttttcttacatatccgtcacacattggcaggaggaggtaaaaggcatgacatgttattcagtcaagaaaatttatttcattatgacaaaggataaagctagaggagtaaaaattagcttcatggtttaagacttaagacaaccacaaccccaaacagctcttgaatagaatttgagagtagaaaaggtctgaggttgtcagatgaagatcttcaaggacttagtgaagtaatgtgtaatttttcgttcaactagaaaaccttctgccttatagaaacgacttgtaagctcatcagctctccagagttcctgtttcagggaatgcccccagcactgatagaactgtccaagttaaaaactgtttctgggatgtttcttggactctaatgtttctcatatgaattgttgcaacagtctctcaactagccttcctgccatctacagacttgcaggcacaatcacacttagctagaaaagtcttcctaaatcataaatattcctaaaatcttttagtggttttctcttactcttgggtaaaaagccagactctttaatatgagctctctatgatctggcccccacttatctcttcacctccatttctcgctacttctttca

SEQ ID NO: 2144 - DNA, 2000 bp, Homo sapiens
  misc_feature (1)..(2000): DMR15:44363401
ctcaaaagaagccatttatgcagccaaaaaacacatggaaaaatgctcaccatcactggccatcagagaaatgcaaatcaaaaccacaatgagatatcatctcacaccagttagaatggcagtcattaagaagtcaggaaacaacaggtgctggagaggatgtggagaaataggaacacttttacactgttggtgggactgtaaactagttcaaccattgtggaagcagtgtggcgattcctcagggatctagaactagaaataccatttgacccagccatcccattactgggtatatacccaaaggactataaatcatgctgctataaagacacatgcacacgtatgtttattgcagcactattcacaatagcaaagacttggaaccaacccaaatgtccaacaatgatagactggattaagaaaatgtggcacatatacaccatggaatactatgcagccataaaaaatgatgagttcatgtcctttgtagggacatggatgaaactggaaataatcattctcagtaaactatcgcaagaacaaaaaaccaaacaccgcatattctcactcataggtgggaattgaacaatgagaacacatggacacaggaaggggaacatcacactctggggactgttgtggggtggggggagcggggagggatagcattgggagatatacctaatgctagttgacgagttagtgggtgccgcgcaccagcatgtcacatgtatatgtatgtaactaacctgcacattgtgcacatgtaccctaaaacttaaaagtataataaaaataaataaataaataaaaacacacacttaacacttagaaaacaagctcggtatggtggctcacatctgtaatctcagcactttgggaggctgaggcaggtggattgcttgagcctaggagtttgagaccagcctgggcaatatgacaaaaccccatctctacccaaaatacaaaaaaattggacaggtgtggccgggcgcggtggctcacgcctgtaatcccagcactttgggaggctgaggcaggagaatggcatgaacccgggaggcggagcttgcagtgagccgagatcgcgccactgcactctagcctgggtgacagcgcaagactccatctcaaaaaaaaaactggacaagtgcggtggaccatgcctgtgttcccagctactcggaatgctgaggtggtaggattgcttgagcccagaaagcagagattgcagtgagccatgattacaccactgcactccagcctggggaaaagagtgagatcctgtctcaaaaaaaaaagaagagaaaagaaaacaacttgattaaaaaatggactgaaaacctaaacagacacctcaccaaagaaggcataaaaatggcaaacatatgaaaagatgcttcatatcatgtgttatcagggaaatctactacagtagattttggaccattctaataggccaagttccagcacactgaaaacaccaaatgctggcaaggacgtggaacaaaagcaatttttatgtgttgctggtgagaatgcaaaattgtcaactacttgggaaggtagttgggcagtttcttacaaaattaaacttactttgaccgtatgatcctgaaatcttactccttggtatctatcaaaaagagttaaaaacttgtatccacacagtagcctgcacataaatgtttatagaagctttattcgtaattgccaaaacttgaaaacaaccaagatattcttcagtaggtgagtggataaactgtggtacctttggacaatggaatattatttaccactgaaaggaaatgagatattaagacatgaaaagacttggagaaagctgggtgtggtaattcacacctgcagtcccagcacattgggaggccaaagttgacagatcgcttgagcccaggagttcaagatcagccttggcaacacagtgaaaccccatctctacagagaatacaaaaattagctgggtgtggtggtgtgtg

SEQ ID NO: 2145 - DNA, 200 bp, Homo sapiens
  misc_feature (1)..(200): DMR15:44793901
attgaaaaacaaggtttgaagagtattgatatgggaaaatgttcattttagatatatgaatatatttatgtgtattaaaatttaatccctttaaaaggacaagtacactaaaacacaaatttatgaatgatctttttaaattttccttatttcttatgactatacttagtataatattgcttcataattagaaaacataa

SEQ ID NO: 2146 - DNA, 2800 bp, Homo sapiens
  misc_feature (1)..(2800): DMR15:45563901
tgctttccagccatcaatactccccatctttccaatgttttacctgtgttcgtggctgttcagtgaaagactgcatctcttagcctttcttgcaactaagactagcacgtgactaagttctggtctttgggatttgagtgggggtgatacatgcagttccaggtcatggcacagagatgtgtcctctctttccaacccttctccaacctgcttcctgacatggggatgtgctggggccctctgggaccatacagatgaggccagtacccaaagggtgacagagctacaagctaccaggaccccatgtccctgtgtgaacagatagacttctgccttgtttgaaccattgttaccttgatctttgttacagcagctgaatatatactctaatataaatcctaccatgggaaagagactggattaggcaataaacatctaaagatgagtgaaatcttgacagtgcaaatcctgaaagagtttgaaattgtcccaattgtctcagagaactaatatttatggtttttgaacaaatgtaggaattgattctccctggtcttaagacttgaaacttacatttgtcttacctcagttccttcctcaggaaactgaccctcaggcagagaattgaaactcatgagatcaccacatccacacaatgaggtgccagacccccttatccatcatgattgcttctctacccatccctaattccttttttccccaacttccccgcttcataaacctcccaattttagtggtcggggagacatatctgagacttatctcccattctcctctgctgcagcacccaattaaagcctcttccctggaactactcattgtctcagtgattgacattccatacagtgagcaacaggacctagaccgaacccttggcgtttctgtaacaagttcacaaccaagtgggaaacatagccacaaacttagtaactgtaatacagggtagactatggaaatgactttattggagatataaacaaaggctggtgggagacattaattctggttgtagtggtactaagaaagacttcctacatgaggcaatatatgacttgggatttggacagtgaattctgataatgaaagaggataaatagggcactccaggaagaaggaacagtatgtgtaaaggtacgaagatacagaagtgcacattgtatctagaaaataaccatcagaacaggcagaacatcagtgaatgtcgaggaacaatagtcgaactaggtagggaccagattgtgatggcccttgaatgtcatattagggaatttggggccaggcacagtggctcgcgcctgtaatcccagcactttgggaggctgaggtgggtggatcacttgaggtcaggagttcgagaccagcctggccaacatggtgaaacccctgactctactaaaaattatagaaattagcctagtgtggcgacgggcacctgtaatcccagctgcttcagtgtcagctctgtgtccccatccaagtctaatgtcaaattgtaatccccatgtgttgaaggtggggcctggtgggaggcgatttgatgtgggtggtttctcatggtttagcaccatccccagtgctgtctcatgatagagttctcatgagacctgatgttttaaaagtgtgtggcagttccccacttgttctgtctccttcctgccctgccatgttaaggcttgcctgcttcttcttcaccttccgccatgattgtaagtttcctgaggctagccatgctccctgttaagcctgcagtactgtgagccaattaaatttcttttcttcataaattactcagtctcaggtagttctttatagcagtgtgaaaatggactaatgcaaagatgaaatatgaaagccagagggtctcctaggcaggaaataagtagactctcaaatcttgaagtcagatggcagcaaaagttgaagaaaaggcccaggactaaaacaggagctaaacttgctccatagaagagtgaattggtggccaggcgtggtagctcatgcctgtaatcccagcactttgggaggctgaggtaggcagatcacgaggtcagatcacgaggtcaggagatccagaccatcctgggcaacatagtgaaaccctgtctctactaaaaatacaaaaattagctgggcgtggtggtgggcacctgtaatcctagctacttgggaggctgaggcaggagaatcgcttgaacctgggaggcattggttgcggtgagccaagattgcgccactgcactccagcctgggaaacagagcaagactccgtctcaaaaaaaaaaaaaaaaaagaaaaaagaagagtgaattggcagggcactgtgggtggctcacacctgtaatccaagcactttgggaagccaaggcagatggatgccttgagcttaggagctcaagaccagcctgggcaacatggcgaaaccccatctctacaaaaaataagccgggcatggcagtgtgcacctgtagtcccagctacttgggaggctgagatgggaggttcacctgagcctgggaggtcgaggctgcagtgagtcacgatagtggcagagtgagatcctgtctcaaaaaattaaaaaaatacatagaagagtgaatcctcagccatgccaagtgtgttacatcaatgtcagtgtctttactgggagggagtgggatcctgaaacttgagatggaaaaatccaggttgataaacttgaaaatcttgaatcctcagattccccttggccctctgggtctgaagaagcagctcagtccttcctgtgaaaggccgatgatcc

SEQ ID NO: 2147 - DNA, 1600 bp, Homo sapiens
  misc_feature (1)..(1600): DMR15:45651001
accgcgcacctgcactcctcagcccttgggcggtcaatgggacagggcatcacagagcagggggcggcgcccatcagggaggctcacccgtgtgggagcccaccgctggggggctggggcatggcgggctgcaggtcccaagccctgccctgtggggaggcagctgaggcctggagaagaattcaagcgcagcacctgcgggccggcactgctgggggacctggtgcaccctccgcagctgctggcccgtgctaagcccctcactgcccgggcctgtggcaccagcctgccactccaagtgcggggcctgctgagcccacgcccacccagaactcgtgctggcccgcgagcgtcgctggcagccccggttcccgcccgcgcctctccctccacacctccctgcaagcagagggagctggctctggcccctgccagcccatagaggggcccccacagcgcagtggcggcctgaagggctccttgagcatggccagagcggatgccaagtccgaggaggtgctgagagcgagtgagggctgcgagggctgccagcacgctgtcacctctcactacctcagcctccaaggtagctgggactacaggcatgtgccactatgcccgtctaatttctttttttttgtatttttggtagagatggggttttggcatcttggctatggctggtctcaaactcctggcctcaagcaatcctcccacctgggcctcccaaagtgctaggattacaggcatgagccaccgtacccggccttgatttttaagtgtatttcatcttgtaagaatgtagagatgaagtggctgcattctcctgtatcattggtagttaattcttcttcttcttctccttctcctccttctccttcttcttcttcttctttcttttttttaaaaacagactctcactctgttgcccaggctggagtgcagtggcatgatctcagctcactgcaaccccccgcctcctgggttcaagcaattcttgtgcctcagcctcccaagcgtgtgccaccacgcctggctaatttttgtatttttagtagacagggggttttgatatgttggccaggctagtctcaaattcctgacctcaagtgatctgcccaccttggcctcctgaggtgctgggattacaggcgtgagccaccacgtccggccggtagttaattcttatttcttaaaaaagctgtatgtttcaggctatcttctgaggagactaagaaatcatatcagatttatgctccttgttgacagaagttttcagttttctatttcttctctgctgactttagggtccagtttgatcttccattgagtgattgattgattgattgattgagacagagtcccactctgttgcccaggctggagtgcaggggtgtgatctcagctcacagccaccaccacctcccaggttgaagcaattcttgtgcctcagctttcacagtagctgggattacatgcacggggtaccacgccggcaggtccggctacttttttctagtttttgtagagaccaggtttcaccatgttggccaggctgttctgaaactcctgatcttaagtaagtgacccgcccacctca

SEQ ID NO: 2148 - DNA, 1500 bp, Homo sapiens
  misc_feature (1)..(1500): DMR15:45884701
atattctggtagtaaacataggcgaatgattcagggccttaaaaatccacctggctaattatctcagtgaatatagaatctggagccagacaaataacagttcaaatttcagctgtatcatttcccaactttttgactttggtcaagggacaaactctcggagcttcacatgtaaaaagataaagacgcagactctatttctaggattgaagagagagttggatgagggaacaagtactggaggactaggtttaaggtctgtaatatgaacactgaaatgtttgttttcctcttctatgtttagcagggcccagagggtgcttttctggtgtgttttggatgttacccagagagttcctaagccacacgaccattctgttgaggaggaggcatatgggctgagagggggtagtgtcttgaaccttagtctagctccagcatttgcagtctgcaggtcacacattttctttctgcccttcccttcctgtcgctcctctcaggaacgaagccatctggcacagttcctcacagtgttcactagccatcatcagtatcaactctcaagaggtgagtttcctcatcagtccccgtcctcctgtgagggcagctcctctgactcttccatgttgctctcttctggtgcctgactccataggtgcccagaaaatggagcagccaggaacccctctcttccactcctcccccagcacagcctccttgtgtctctttgggagaacaagtacttccagatggaagaagattccaggtctcctctgtgggcctctccagagcattgttatcgggatggccagggcatttttttgttatgaacacctaaatctctttttgacatctcaaatcttatccatctcattcagttcacttttggcacccaaatctatcaggtgctcaagccattccttttctagccttgattcaatttaacaggaaggaaagtagatcctacacaataaagttaattatcattgctgcttgattctgaattctttccagctcaataaccttcttattttttgaagattggggaacaaactacacaatactctaacgagggttcttgccgtaaaagtgagaggtgacaacatgctagcagccctcgctggctctcggtgcctcctcggcctcggcgtccactctggccatgctcaaggagcccttcagcccaccgctgcactgtgggggcccctctctggggctggccgaggtcggagccagctccctctgctggtggggaggtgtggagggagaggcacggcagggagtcggggctgtgcacggagctcgcaggccaggctggtgcgggttctgggtgggcacgggctggcaggcccagcactctgcgcggccgtcccgcacctgctgggcttgataggggtaggagctccctctgggctgctggagtgcccgggctaggtgccgcaaagtcccgctgccagtgccattgagaggtgaagctggctgggcttctaggttgggtgg

SEQ ID NO: 2149 - DNA, 300 bp, Homo sapiens
  misc_feature (1)..(300): DMR15:46767801
ttatcctgttagtaagtattttcctttaattttatagtaagcagaaaacttttgtggttgggtgttgcaggaagtcagggaccccgaacggagggacctgctgaagccgtggcagaagaacataaattgtgaagatttcatggacatttattagttcctcaaattaatacttttataatttcttatgcctgtctttactgcaatctctgaacataaattgtgaagatttcatggacatttatcacttccccaatcaatactcttataatttcctatgcctgtctttaatctcttaatccc

SEQ ID NO: 2150 - DNA, 4800 bp, Homo sapiens
  misc_feature (1)..(4800): DMR15:46780701
ctccaactacatggagcaaaactgaccaagggcccctggtgctatgctctgaattcatagccacagtggctcaaagaccaagtttcccacgagctgcttttaggcaatagctgagtgtaatagagatactaagaccagttcattcttggaagccctaagatttttctgatggccagttttgacttaaagatatcctgagggctttgctgaaatttaatttgactgcagaggagtctgggaacttctactctcctcccctccctttcttcttcccttgggtaagacttgcatcactgccttgtgactctcccagctttctcctgctccctcctcattatctctcacaggctattcctatgacaaaagccatgcatatttaatcatatcttggtatctacttcttgggagacctgggctaaaactccaattaaacctgatctttactctttagtgttccagtgaagattatctctctaaggtcaccaataacttctcaagtgccaaactactcctcgtccttttgactactctattccacttgtacttttaagaaacaatttatccatcttaaaatactgtcttctttcagttggacataaatttatcctctctttaaatctcacagcattattttcttaagatccatttttgcttttcctaacaccttaagctaaggaattctccaatatttcagccttgaggtatttttcttatctttctctgctctttctcttcttggtgctactcttgctcatactttcaacacaacttcctaccttagtaccgttaggaatacggtactaatcctgtactgtattcctaaaatttccctatatttgagaatatgtttttcttgatttcaactttcacattcaaaatctcccaaactaaatgcaacttatgtaagcacagttcctaagccagcttttacttctggctggctttatagcctcctaaatttattctcaaatataggggatacagtagacatttcaattttttgttaaccatgtttgaacatcctttctgtatttgggtaaactgcatgtattatgattcctgctttcagagagaaactagaaaacccatgtccccatacagtcctctttgtggtcatgtgacctgcactttgtccatcacacacacttctataacagttggattcaaagatggggagagcgcagaggcatttgcatttacatagatataaaagaccttgaatctctcacttcatggattctgttcctgccaaagaatcctcaccactcatttaacacacctggtcatgcctctctgcattgcttagaccgtttgtcagtctcagcctcttaagcatatccaccttcaaatgtattagccagccctctttgttatctttattagccagactctttattatctactcttgaaagtgttgtccatggtttccatcattatttcccacttgccatgtacttctctgcactgaaactgctcttacaatgaccactattgatattttcgatgttaatcaaatgacaaatttgctcctaatgttataaatctttaattataattggacattgttaatttttctctaatagtattcccttggcttttgagactctacatcctactaagtttccttcatgggtgattcttcttaagccagactcttaaatcttggtgtccttcggtttcttttttctcactgcaaattttatctcggaagaatcaaccattttcacgttcctgattttcaaaaccatattttcagtctggttctatttctgagcccctgaccctaatatctaattgctactggatatcacttctggattattgccttgctactaaaaactcattattattatttccccttcattcttatattctttttcttctttgactcattccaccaactacactgttactccaccaaatcataaggattaacgttttttctaccacaattgctacatttcataagccacaaaattttatgtcctttatctcttgattcgtctattctattaattttgccattactataactgtattccatatcattatttacctacatttctgtgatactctcctaactggcatcactattcttcctctccaactggtcaattgctcatactgtgctcagaatttctctcatgttaatctgatcatggaccttctttgcttaaagcttatccagttcccaagtgctttagagcaagttctaacatggaattcaggaccatgaaaccacctaactttcatgttcaccatactttctcacacatgtgttctaaccatcctaattgatttccattttggtggcatactctatactctcttgtctccgaattaatgccttatatgcccatttcttcccctggataaatgttcttatctcttttcttggcattttctctggttcccccaggaaaaattataaattacatgctccttttatatccctacagaatgtcatctttcacccttacagaccatagtacaatgtgtttctgtttactttctagtgctcctctacactgttcagtatgtgaatttgacattaaatgcccctcctagctttcttattaccaggcatattataggcaatccgtattgtggaatgaatgaacatgtgaatgaatgttgaattgaattatttctaatcccaaattgacttttatatcttcttgctttgaatctccctaacaattctgtactaactttattttattatactttgaattcattatttgtgagctgaacctactgtcactatatcacctctgcaaagtaagtcacatcgcagaagaatgaaattccattgagctcttgtgtcaatttttgcaaacagatctttccccaatcaatattagaattaatgaaattccacaggggaggcaaaaggtcaggcactgatcacacattactgatcacagcatctgctgatgtttctgtagaatttaaatctatagactaataccaccttcttgcttttaatatgcctgtgaggatgtagggaaaaaacacttcacaatcatggttgagaagctaaatacaatcgttttagaaactcagacatatcagaatggaaacaggatatttctgcagttgttcttcttttgtataatgcatatctgtttaggtacataacagctgaaatttgaaatgtcagtttttattaatgaaagagagacagtaacagacttgatgaaaactgacctgatctgcacatcaaatgactgggtaggtacacagaaaagaatttattctgcaaatgcaatttattctgaagatgactgtggttcctctaaggtattatagaagaatattgaggttttgtttaagataataagttagttattaagaatccaaatctgtgaactgaatctaatagcagactagttaaactatattttagagaaccagaaagaaattggtaataaagaggaagcaattattcttcttcggtatattgcccattctaattccaaatgtttaactagagactgtcagaccaatacttcccttgtcacatacatagggtttaaatgctacataacaattgctcaaatggggccactttggaaacataatttgaactaatagaatttttggtgacaaaatattgtctttattttagagaagcatgtctttagagctcaggatgaaaagcaaagggaaaaatataaaaaggatctctatagcatattggacagagcataaacagcatttattatatgtatgtatttctatcttgtactacacttagagcttcttaaaagaaaatagtgaaattcctttctacttacttctattcctatttgctcaaggactgagtagtaaatcgataaacatatactcttattaagactgtgttaacataacaaatgatgatacaagactggctagatatgagactaaacaatataaattttaaagttttaaataatttgatgaaaattagattgttcatttagtatagataaatgtctcacacaatacttaatccaatcccacattgaaaacacagtaatgcaatacaagagtggtaattaaatataagacataagttgtcagaacttagtctcagccttagcataccattgcatggtccagccttggcctttatagttaagagaaatttgaaattgaaaatattcttttcccgggcaatagaaaccaaaaagactatattttgcctctttgtctcaattcctgtttcttggttcatccttcatgtttttcatatatatatatatatatatatatatatatatatatatatatacacacacacacacacacacaacacacacacacacatatatgatttttacatctctctatagagatacagagagatgtagaaattcatacatagaaatatagcaattcatatagaaatatacagaattcatatatagaaattcacatatagatatatagatgatagatacatagatatgaaagaaagagaaagagagaaagagagatatgttgattaatcattcctgtcttttgtggaccaaataatcccaatgcttttaactttactattgtgaaattctggtaaatgaatgtgactacacataaatgaagactttcaccatggcactacgtattttaaaaattgcctgctctggcagaaagacattgatcaactgagaacaacattttaccagcataatgatcacactttgaaggctggtaactccagtaatgtttctgtcattcttttaattttaaacttcaaaattataccatatagggcaatgaattacatttcagttctgccttagaaaaatcact

SEQ ID NO: 2151 - DNA, 200 bp, Homo sapiens
  misc_feature (1)..(200): DMR15:46999801
ctcgcccagctaatttttgtatctttagtagggacagggtttcaccatattgatcaggctggtctcaaactcctgacctcagatgatccacccgccttggcctcccaaagtgctgggattacaggcatgaaccactgtgcccaggctatgcagatttttacacttattttgttatacaaatatgggcaccaccacacgtt

SEQ ID NO: 2152 - DNA, 200 bp, Homo sapiens
  misc_feature (1)..(200): DMR15:47638501
atcatttatatgatttttttctcttgaacaatgtttgacaataatcagatgataatgaaatgtataattaataacaaaaatgccaacatctgttagcttgttattacagactgatttttcaatgtactatttcaaatgtgtcagcattaacctaatttatattaaaatctgctaaatacaatctgctttcattagttgtt

SEQ ID NO: 2153 - DNA, 1500 bp, Homo sapiens
  misc_feature (1)..(1500): DMR15:53604201
ggtgaacctgacaaaaacaagcaatagggaaaggattccttacttaataaatgttgctgggataactggttagccacatgcagaagattaaaactggaccccttccttacaccatatacaaaaattaactcaagatggattaaagacttgaatgtaaaacacaaaattataaaaaccctggaagataacctaagcaataccattcgggatataggcataggcaaaggtttaatggcaaagatgccaaaagcaactgcaacaaaagcaaacattggcaaatgggatctaattaaactaaagagcttctgcacagcgaaagaaactatcaatagagcaaacaggcaacctgcagaatgggagaaaatttttgcaaaatatgcatcttacgaaagtctaacatccagagtctacaaagaacttaaacaaatttacaagaaaaaaaactctattaaaacatgggcaaaggaaatgaacagacacttttcaaaggaagacatatatgtggccaaaaatcatatgaaagaaagcttaacatcactaatcactggagaaatgcaaatcaaaaccacaacgagataatacctcacactagtcagaatgttgaagtcaaaaaattatagattagaaaatcaaaaataacagatgctggagagactgtggagaaaaggaacgcttatacattgttggtgggaatgtaaattagttcagccattgtggaagacagtgtggtgattcctcaaagacctaaagacagaaataccactcaacccaacaatcccattagtggatatatacccaaaggaatataaatcattctattataaagacacatgaacatgtatgttcattgcagatctattcacaataacaaagacatggaataaacctaaatgtcaatcaatggtagactggataaagaaaatgtggctcatatactccatggaatactatgcagccataaaagagaacaagatcacgtgctttgcactgacatggatggagtcggcggccattatcctccagtaaactgacacaggaacagaaaaccgaatactgcatgttctcacttataagtgggagctaaatgatgggaacacttgaacacgtagaagggaacaacctacactgcaacctactgaagaacagaaggtgggaggagagagaggatcaggaaaaactactaatgagtactaggcttaatgcctgagtgatgaaataatctgtactgcaaacccccatacacaagtttatctatgaaacaaacctgcacttatacccctcaacttaaaataaaagttttaaaaaagtaaaatcaagctaacataattcaactaactgcttaaatgaatggctttataagtaatttgaggatagccgggcatggtggttcacacctgtaatcccaacactttgggaggccaaggcggggggatcatttgaggtcaggagtttgagaccagcctgatctacatggtgagactctgtctctactaaaaatac

SEQ ID NO: 2154 - DNA, 2200 bp, Homo sapiens
  misc_feature (1)..(2200): DMR15:53805501
cacacatcacataaaagaatataagtagatgtttaacatcatgttcagtatacttctcaaacatctgaggtatgaaagaaccctgacctttgaaagtatacaatcttgacttttaacaccctgatttatacacctaccagaaatatgagcttcagaggaaagtatctaactggagagcctaattggaagtatcagttttgactgtatttccaaagtggatatgacatttttctttttttttttttgaacagaacagagccctcagaaataacgctgcatatctacaactatctgatctttgacaaacctgagaaaaacaagcaatggggaaaggattccctatttaataaatggtgctgggaaaactggctagccatatgtagaaagctgaaactggatcccttccttacaccttatacaaaaattaattcaagatggattaaagacttaaacgttagacctaaaaccataaaaaccctagaagaaaatctaggcattaccattcaggacataggcatgggcaaggatttcatgtctaaaacaccaaaagcaatggcaacaaaagccaaaattgacaaatgggatctaattaaactaaagagcttctgcacagcaaaagaaactaccatcagagtgaacaggcaacctacaaaatgggagaaaatttttgccacctactcatctgacaaagggctaatatccagaatctacaatgaactcaaacaaatttacaagaaaaaaacaaacaaccccatcaaaaagtgggcaaaggatatgaacagacacttctcaaaagaagacatttatgcagccaacagacacatgaaaaaatgctcatcatcactggccattggaaaaatgcaaatcaaaaccacaatgagataccatctcacaccagttagaatggtgatcattaaaaagtcaggaaacaacaggtgctggataggatgtggagaaacaggaacacttttacactgttggtgggactgtaaactagttcaaccattgtggaagtcagtgtggcgattcctcagggatctagaactagaaataccatttgacccagccatcccattactgggtatatacccaaaggactataaatcatgctgctataaagacacatgcacacgtatgtttattgcagcactattcacaatagcagagacttggaaccaacccagatgtccaacaacgatagactggattaagaaaatttggcacatatacaccatggaatactatgcagccataaaaaacgatgagctcatgtcctttgtagggacatggatgaaattggaaatcatcattctcagtaaactatcgcaaggacaaaaaaccaaacaccgcatgttctcactcatatatgggaattgagcaatgagaacacatggacacaggaaggggaacatcacactctggggactgttgtggggtggggggaggggggatggatagcattaggagatatacctaatgctaaatgatgagttaatgggtgcagcacaccagcatgtcacatgtatacatatataactaacctgcacattgtgcacatgtaccctaaaacttaaagtataataataataaaaaagaaataataaaaataaaaaataaaaaacaacaacaaaaaaaacaaaaattctaataaaggggcatcctacaatatagttgaccaatgcttctcaaaattgttaaagttacaaaaatgccagaaagtctgagaaactgtcacagccaagaggagccattttgttcagtattttgtttagtatttagtattttcatttatttatatccattatgtttctttcacttctctgctaatcgtactatttgagtcattttgagatgggtttatcttgactctttttgttctttagcattggtcatgtgcttccatttctttgcatgaatcatacataatagacttggagaaggctgatttttattccagtcaacaattaacatggctggactcaaactccatctgtgtcccctgaagtcaacagtttccctaggatctgtagtttccagctgctgctttttaactagttcccctgtgaagtttagctgagtggtcagcctacatttcaggccaatattagctgctattttgggacacacccactacatgaccccttctcttccaagcttcctggctgctccccaaaccctaaactctggccttttatgcttc

SEQ ID NO: 2155 - DNA, 400 bp, Homo sapiens
  misc_feature (1)..(400): DMR15:57007601
aagaggtagtattagattatccctaaggtcttttccagctttccagtgatttttttgtataatgaaaactgactaatatgataagtctgagatgccgacagattgagaaataccttctgaaaactcaaggaaaatgatgtaacaaatatttttccttctttctttctttctttctttctttctttctttctctctttctttctttctttctttctttctttttctttctttctttctttctctctttccctcccttccttccttccttccttccttccttccttccttccttccttccttccttccttccttcctctttctttgtttctttgtttctttcttttttctttctttctctctgtctctctctctctctcgctctctctctctctttctctca

SEQ ID NO: 2156 - DNA, 200 bp, Homo sapiens
  misc_feature (1)..(200): DMR15:57090801
tttagattggcagagatatatatgacctgcagttttaattaatagagttcaaagccttgtttagaaacaatatgattttggaggtaatgctgtacttaaagagtgcgtaaaagtctgagaaccaggacaggtttcatcacgtagtaattttgtaacacttgtttttgtttgtaaactttatcttttttcccctttgcttt

SEQ ID NO: 2157 - DNA, 3800 bp, Homo sapiens
  misc_feature (1)..(3800): DMR15:57722401
tgcctgacttggtctgttttgaatgtgcccattttcacacctcttcttttccatcttcagcagttccacttccatcagcctacagaaacttctcacctgtccttctgaaacctcttagtcttttatcagcatccaagggtaacaagactcttggggtctgaacagtatagctggctaattagcatcaatcaactcttatcaatatctcagtgcatatcagattattagatgattttttcctgaaggaaggtagggcttaaagcaatggtaaatggaacgggcaagttttttgcggggtggagggtggtaggagagaagagagaaaatggaacatgaaagaggaggaaaaggataggaagcagcctggaggggccctgaacagccaaagggtagcaagaaagcataatttggaagagttgtctatcacactgtcagctcctcccttcccattttctctcacatccacttaaattttaagtatttgctccaaacattttcctgaaaaagcttttgtcaaggtcaccagtgaccttcatgctgctaagttcaataatcaatttccagtcgtttttcttgaacccttagcagtttttgatataggtgatctccccctctttcatgaaacattttttttttttcctggtttctggaataccacttctgggaggtacaggcatacttcattttattgtacttcccttgattgtgcttctcagataaggctttttttttttaaaaccaattgaaggtttgtggcaaccctgggttgagcaagtacattggcaccagttcttccaacaacatgctcacttcatgtatctgtgtcacattgtcacattttggtaattcttgcaatatttcaaatgttttcattattattatgtctgtccatgatctttgatgttacctttgtaattgttttgaggtgccatgaaccattcccctatcagatggggaatttaattgagaaataaatacatgtgtatgttctgactgccccacccactggccattcccccaactctctccctctccatgggtcgtcctattccctgagacacagcaatactgaatttaggccaattaataaccctacaatggcctctaagtgttcaagtgagaggaagagttgcacgtctctcactttaattcaaaagctagaaatgattaagctggccgggtgtggtggctcacgcctgtaatcccagcactttgggaggctgaggcgggcagatcacctgaggtcaggagttcgagaccagcctggccaacaaggtgaaaccctgtctctactaaaaattcaaaaattagccgggcgtggtggcgggtgcctgtaatcccagctactcaggaggctaaggcaggggaatcgcttgaacctgggagacaaaggttgcagtgagccgagatcccgccattgcattccagcctgggtgacagagtgagactccatctcaaaaaaaaaaaaaaaaaaagaaatgattaagtttagtgaggaagacatgttgaaagctagataggcccaaactaggcctcttgcaaaaaactattagccaaagtgtgaatgcaaaggaaaagttcttgatgggaaattaaaagtgctactttagtgtacacataaatgataagaaagtgaaacagtcttattgctaatatggagaaagttttagtggtctggatagaagatcaacctagccaccatatttccttaaaccaaagcctaatccagagcaaggccctaattcttttcaactctgaaggctaagaaaagtgaggaagctgcagaagaaaagtttaaagctaggagaggttgcttcatgaggtttaaggaaagaagccatctccattaacataaaagtgcaaggtgaagcagcaagtgctagtgtagaagatgtagctagttatccacaagatctagctaaggtctttgatgaaggtggctgcgctaaacagattttcaatgtagacaaaatagccttctattggaagaagatgccatctaggactttcacagcaagagaggtgaagtcagctgggcgcagtggcttacgcctgtaatcccagcactttgggaggccaaggcgggtggatcacgaggtcaggagatcgagaccatcctggttaacaaggtgaaaccccgtctccactaaaaatacaaaaaattctccgggcgtggtggtgggcgcctgtagtcccagctactccggaggctgaggcaggagaattgcgtgagcccgggaggtggagcttgtagcgagccaagatcgcgccactgaactccagcctgggtgacagagcgagactccgtctcaaaaaaaaaaaaaaaagtaaaaaaaagagaggtgaagtcaatgcctggcttccaagctttaaaggacgagctgactttgttcccccctaggggttaatgcaggggtgactttaatttgaagccagtgctcatttaccattctgaaaatcctagggttctgaaagattatgctagttgtactttgcctgtgttctgtaaatggaaaaacaaagcctagatgatagcacgtctgtttacaacataatttactgaatattttaagcatactgttgagacctgctactcagaatgaaagattgttctcaaaatattactgctccatgacaatgcacctagtcactcaagagctctgatggagatgtataaagagattaatgttgttttcatgcctgctaacacaacattcattcagcagcccatggatcaaggtgtaatttctgctttcaagtcttacaatttaagaaatacatgtcataaggctatggatagtgccatacatagtgattcctctgatgaatttgggcaaagtaaatagaaaatcttttggaaaggactcaccattctagatgccattaagaatattcgtgattcatgggaagaggtcaaaaatcaacattaatgggagtttggaagaagttgattccaactctcatgcatgactttgaggggttcaagactttagtggaggaataaactgcagatgtgatggaaatgacaagaactaattctattaattctgttagaagaaattctagttctagaattagaagtggagcctgaagatggtactgaactgctgccatctcatgaagcaatcgttttcatttgccatcatttcagaacttgaaatgatgaagagtcgcttcctgtggcagaacaaagaaagtgatttcttgagatagaatctactcctggtgaatatgctgtgaatattgttgaaatgacaacaaaggatttagaatttttttggggtgggggatctcgctctatcacacaggctggagtgcagtggcaggatcatagctcactgaagccttgacctcccaggctcaagcaatcctcccaccttagcaccctgcgagtagcttggattacaggtggtgtgcatcaccatgcctggttagttttcttgtatttagtagagatggggtttcgccatgttgcccagtccggtcttgaactcctggacttaagggatccacccgccttggcctcttacagtgttgggtttacaggtgtgagccaccatgcccagcaggatttagaatatttcataaacttagttgattaagacgtggcagggttttagaggattgatcccaatttggaaagaagttctgtgggtaaaatactgtcaaacaatatcacatgctacagggaaatctttggtgaaaggaagagtcaattgatgtagcaatcttcattgtagtcttgttttaagaaattgccaaagtcacctcacccttcagcgatcacaaccctgatgagt

SEQ ID NO: 2158 - DNA, 300 bp, Homo sapiens
  misc_feature (1)..(300): DMR15:58729901
gcggcgagccaagaccgtgccactgtactccagcgtaagcaacagaacgaggctctgtaaaaaaaaacaaaaacaaaaacaaaaacaaaacaaacaaacaaacaaaaaaaaaaactcattgaagcactttagattttcacattaggaaatcgtaagcataatgcaaatattcccaaaatcggaaaatttaaagatccaaaacacttttggttccaagtatttcaaataaggatactcaacctgtatatccttatttctacacacttgctttaatgtaagcatttaacaatacattaatag

SEQ ID NO: 2159 - DNA, 1100 bp, Homo sapiens
  misc_feature (1)..(1100): DMR15:59135801
aagaatggctatggcacccagaggaggaaaggtagagaaatggcagtctctacttacaaccattccattattgatgggcattacactgattccagcttttcactattatggcaagaaaacattgttttagtttgttagggctgccgtaacaaactaccacaaaccgagtggcttaaacagcgaaatgtattgcctcacagttctggaggttggaagtccaagaccaaggtgggcagggctggttccttgtgagggtgtgagggagaatctgttccaggcctctgtccagggcttgtgaatggctgtcttctccctgccttttcacatggtctttcctctggcatgttggtctctgtgtccaaatttccccttttcatcaggacaccattatattggattaagacccactctaatgacttcattttaattagttttgtttgtttgctccataaagactctatttccaaataaggtcatattgtgaggtactggtggctgggactccaacatcttctttggaggcacacaattcaacccataacaaatgtcataaaagaagaaggtgttcgccgattcctttatttatttaggaggtgggggcaggacgcggagtaagtttcctatagggaaagagttgagaagagtctgcagggactgacctagaaagcagtgacactccgtagttggaaaaaagcagagcacatctttaagtacctggtgtgagttttgtaagaaaacctaccttatgaatgagtacagtggaatactacttagtacattcatacatgtttctaccatctcaagatttttatatatacagtatatgatctgtttttataaatgtacagcttgaaaaaagatccttcttgtagtaagtacagcatttaaacacaaaccaatatgggccagccacattctaattgaagacccagagaaagcaaagccagcagcccagcccccagcccccagcccctgacctgcttggcggccctgatggtcccggcaaagtgtaaaccagtgcccctctgtcgccctgggctcagcaggccagcttacccttggcacgtacatgggaagtgcctgctcacgctaagcccagt

SEQ ID NO: 2160 - DNA, 900 bp, Homo sapiens
  misc_feature (1)..(900): DMR15:59208601
tatgatttgcttcatgagaaaccagatcacaaacccaaaggcttaaaacagatagacattaaaatggatattggccataccttcccagcataatgatgaatgatgaagccttggttccaactgttgaagtgctcatgactcccaatctgcatctgaagtttctggagcagcgtctgatctgccccctcacccaccgcatgcatcgtggcgcacacgtcatccaggatgctcatgatgccaggagggttctgatgggagcaagaaggcaaggccctagtcactgacctctccaaaacagacaatgcttatcaggtcctttcttaggcaaggaaacagctccccagacttaagataccatcttgaaagtcagtattccccttcaggcaagaatgcaattaatagtcccaaatagggagtcaccacttagatctaaagagggaggaaactccactttccaaaaagctgtttaactccctgaagttttatccaagagtcatgcacagatcattatctgctcactcatagtcatgccaaattgacttgcttaagaatccaaaagtaaaaacattttcctttgacctaatctatttcttaatgttctctttcagcgtgttacccatataggcatcatttcggtagttatttagtgtacacattctataatgcatttcctttttcacatagcactattttataagcattcctcatgttttacacattcttcacacttactattttaatggctatacttctctgttctgatatgctatagtttgtttaataactaagttgtctggccgggcatggtggctcatgcctgtaatcccagcaatttaggaggccgaggggggtggatcacgaggtcaggagttcaagaccagcctggccaacatggtgaaa

SEQ ID NO: 2161 - DNA, 200 bp, Homo sapiens
  misc_feature (1)..(200): DMR15:59877501
tctagttgtttcttttgttgctactgcacctaccttgaaaagtgctcctatcacctagctgcaataaaatcagtgctataggattatctagtgcaaactccctctttgagaaataagaagcaaatttggagaggtgaacagatacaatgaagataaggtctcaaggtatttgatcgactatggattagagaactgagtaa

SEQ ID NO: 2162 - DNA, 1500 bp, Homo sapiens
  misc_feature (1)..(1500): DMR15:60203301
tcagtcaagaatgctacaaacaattattgaatccatttttagtttttcagtagttattgaatgatacatatctaatacatgtcatgaaagatctcagtttgaattttgaggaataatatgaagtaatgtatataggctttcagtttctcactcacattttaattcagcttccacactatttcttctaaaatcaaaactcagcaaattcagattactctcccatcaaactcagaaattctgttttggtatttatctgtggactcttaaaatgccacaacttataacaggaatttgcagcattatggaatcaagagttccattaaatatcacgcattcaacaactatatttgcataaagtagaacccatgtaccgcaaacgggatgggagaggggaaaaatcccctgccctcgccgagttcgcagatcccatctgaaccaatcaataacattatcaattgtagacagaggcacctacagagaattctaaaataaaaccacatgtgcagatacatagatgggggcctgaggacacaaaaactgaaaggaaaaaagaaacccagcagaccagattcttcgtaaacctcactgcttcactcctaaatggatccaaagtccaacagcttcattacaatggcctgactcaggagcaggagctttgaaatatcgcatcatggtggcaaacggaggggtgaaggggatctttggtgaagctaatgaaaaaaaaaaaaaagttggacagaacatttcctgctggaacgtgttgagagtgtgtggtgtttcaaccatgggctcctgatgatggaactttagttgctgaacatgaagataatttcagcaccctacaattatgtgcctaattaaaattaagaaattagaacacagttaaaaggaataatattttgctcacagctaatttcattaaagtattaatgaacaggactctttttatggccagagggcaaccactttctacagagtacttccatgctagctaatttattcatgcatgaaaaacaatccaatgagaaatgagggagctgagaactgctggtcctaattaaaatatttaaaacaccatgtctattttcttccatctagccaaatacctaagcctgagccagcatggtgccaattaacatggaaaaagcaaatacaaacacccacggtttctgattaaagtgcacattattgtaccatgcaatatattgttcggcacatatatgtaaatgtttaattaacccatgtctaaatctcagcaacattcagaaatcgatactttaatccctaaacaagtggcaatctgtgtagggagacgctgacttatttatcaccgtgttttattcaaacctcatttgtagcagtcgtgtgctggccatgctaaagcgtttcttaagggaaacgggagggaggagattctttgcttggcagacttcttttcagatggcagcgagattgttagtcgccaaagactcgtgaaaggaactaggctagcctcaggtg

SEQ ID NO: 2163 - DNA, 1100 bp, Homo sapiens
  misc_feature (1)..(1100): DMR15:60696601
catattcctcatttactttaattatattgggtgcttctgcttacacactgcaatgtatcctggcttcataaaatactcactttatatgacccttgcttgctgcctttgacccactcaccgtgaaacacttgcggagccaaaattctaggaaaagcacctgcagttattaatgcattaaaccagtgttctgaaatgactaaatgcattatttctgctgtagaagaaaacgctgaggtgaggccagagcaaaggtaaaagacctggttttcctaaaatggatatagccttagaggcatttatattctcggaggacacagtcctgattcttctgatcatttttcaaatcgacttaatgagtgtgagatggcctgctcattaaactgatataataggtaaatatcacctgcatttagggtgggcaacagaaagagggcaactgttttctgggattgtaaaggatttgcaaatggagcaaaaatgcgggcctggtttctgaacgaggtttatgttctgctctcacttttgactggctgccacaatacacagggcgagagatttttaagctttcatgaactaaaagcaacgccaattgctatggattgctttttatagaatttcaagtaatttcacattacaaatgttacctctgcttatgacttccttaaaagataaccaaatgccaagcccattggaataaacatctagagcaaagagctacatgtaccccaacaaactgttttttcaaaagccacaagcctaggttagatgctttgtctaccacactgccgctcaagtgaagcctcccttcttccatcttccaagtacagccaaaaccctaaacacaacctttttaaggatcctttacaaagtggatgttaaaagtgaacaaaacctcattgaaccatctattcttcttgctttaacctgcagagtcatctacatttgctatttccttcaagtctacttttttttttttttccaaacactggaaacttcagagccactcacacattgcagtaattctgcctgcttgctctacataaaataaggcctgctcttgggttcacacaatcaggccggttactcagtagaatccgtgg

SEQ ID NO: 2164 - DNA, 1200 bp, Homo sapiens
  misc_feature (1)..(1200): DMR15:60859501
gtcttgctctgtcatccaggctggagtgcagtggcacaatcatagctcattgcagtctcttcgtgggactgcccaagagattgtcccatctcagcctggtgagactatagcaacacgacacccgggttttttttctttctttctttctttctttcttttttttttttttttagagatgggggtctcactttcttgtctaggctgtaaattttcagtttaacaagtttcttatgtgatttgtggccacactgaagactcaccagaacagggtggggtggggaatacttaatcaatatttgtggaatttacccgatgaaatccagttattcctgctgaatttctctctcctccaggaggacatagcaaacgagctgaggaaggtgaatgctgcaaccctctctcctcagccctgcagccgatccctgacataaactccttgaagttcagtggcctctttccatgcacctaccacctacacctgctgctttcaaagaaaccacaacctggaccgggaacagaactggacgtgccaaaatgcctgaggacacttcatcgaatgtggctggcttgatgggaagctggcatgactagaaatgtcaggagtcttccctctcgaggtttcaagctttgtgtttctgactcaatggtccggattgagatcagatgagtcaagttcagatgaccatgcaaacctttagatggggcctaaaaccaaatctgtgttctcaaaccattccaaatgtgttcatcaccagttatagtttaccataccacccaatccaagagagtgcagtcatttctctaatagcagatgcataattttctcatcaatggaaaatctaagtgtacatcacaaggtcaaaagttgcgagaaacttgacaccttcgagattgtgccaaacctcaagcttgcagtaataagggctctcagtcaaaccttctgagaatgaagtgtatttgacccaacgtttagcataagcaagcacgtactatgctgtccctttacgatggctgaattcttggctagactatgaaggaacacaacagcctaagcaaagcctatataaaacatcaacccacggtcatggcccaatgagatatagagatattgttgaaatccaagaaagtgaaacaaaaatcctgagccttattcgctaaattcccttaattgtgacacactaaacaagtaacagtcattag

SEQ ID NO: 2165 - DNA, 200 bp, Homo sapiens
  misc_feature (1)..(200): DMR15:60874901
aatactatctacacctcaggagactcttaggataatccaggtaaacatttatcagggcatatggctcacaggaaactcacaacaaaattctagctattcatcagaacaacaacatcatcaataacaacaataatggtaacaacaaaaacactgagactcagagaggtgacaggacttgcagagggtcccatagctagacc

SEQ ID NO: 2166 - DNA, 1900 bp, Homo sapiens
  misc_feature (1)..(1900): DMR15:62556201
cttaggagttttttttttcctttcccctcctacccttctttctattcctatttgctattatgagtagaatttttttaaatgccattttcttttttttctcttctcttctctttttttcttttcttttacagggtctcactttgtcatccaggctggagtgcagtggcacgatcagggctcaccgcagcctcaaccttctgggcttgggtgatcctcgcacctcagcttcctgggtagctgggactacaggtgcacgccaccatatctggctaattttttgtacttttttttttgtagagatggagttttgccatgttgtccaggctggtctcaagagatcctcctgccgcagcctcctacggtgctggaattacaggtgtgagccaccatgtccagctaaacaaatgccatttcctaaatggttcctgtatctgaccatttgtaatccactagactctaggcagacaggcattccatttgcaaatatagaaagttttactgctactgccttcttttgagtactttattttgtttttctgtctgcattggttagagggtgaaataaaatattgaatagtaatagcaggcatccttgtcttcttcctgattttaatggggcactatgtataactcaccatttgttttctcatttccatacatttctgaacttttctttataaggaaacattttgataagaaagtatcaaattaactgtaatcaggggaaaatatttaagtcatttttcatttttttcaaaggatttggcagtgatatgagatgtgccaagaaatagattttatgattgatcaaaaacagattctcatatttgtctctccgttgaggaattccccatgtataggagcatgttaaaacatctgaagactcagtgcactacacagaacctctgagaaaccctaggaacacactttgagcaaggtggtcttatttttcttcaaggaggatgtgagcgggatcaagggttctcaccagtggcagtgacccaggctggggtggagtcttggggtatggaagtcgtgttctccagaagtagatggagccacctaagtgggccctaagagccagttggtagggctgaaattgagaaaatcttcactaattgtcagatccagagggtctttggaggccgcatggaaacagtgaatttagagatgtcacgtaccaaatataaaagaggaagagaatgacacacaagatgtgtgatgtgatagtgcaggactctggcacttttacatggcaggggtccttatctgtgttactgaagagtgggctggcagagttaaagccaaaggcttagaatgtaacctcaaaccttgtcacaactattctttcttgctagtagattcaactacctgggaacactgcagtggcgtgatctcggctcactgcaacctccacctccacctccacctcccgggctcaagtgattctcctccctcagcctcccgagtagctgggattacaggcacccgccaccacacccggctaattttttatttttagtagagacggggtttcactatgttggccaggctggtctctaactcctgacctcaagtgatccacccaccttggcctcccaaagtgttgggattacaggcgtgagccactgtgcccagctgggaacacttttattaggtaaacttcaaattactgtgtgtgcctaaaagccacaagccctagtacctttaaatgaaaggttttgcgccagtggttcttggagccctgtgttctgcagagacgcctcagtggactgcagggttgtacagctcctgatctcattgcctatttcagccaaagcagctctgcttttatgcatctctgttgcttattggacttctaagtggaattatatctgaagaaaagactttgctaaaaaat

SEQ ID NO: 2167 - DNA, 1400 bp, Homo sapiens
  misc_feature (1)..(1400): DMR15:62693701
ccaagatttaatagaatgttaatatgtgcatcttgattttttactatgtaaaattaaagtctgtgcaataaatacgtgacatctaactatatattaaatcatatatttctcttttttattattatgcttttgttcatccatcgcttactaaatatccagtataaagaattttgagtaaacttcaacactttgacttgtgtcccttcaaaatgtttttttaaaggtccttgtatgaagacctgctgattttctttctttttttttttttttttttttttttttttttgagacagagtctccctcagtcgcccaggctggagtgcagtggcgctgtctcggctcactgcaggctccgcctcccagttcaagcaattctcctgcctcagcttccggtgtagctgggattacaggctcctgtcaccatgccaggctgatttatgtatatatatattttttattagagacggggtctcactgtgttgaccaggtttgtctcgaactcctgacctcaagtgatccgcccgtctcagcctcccaaagtgctgggattagaggcgtgagccaccgcgcgtggcctggttttcatttttgcatcttgttttattgcatttccagaaacaaagtaaagatcgatttggactagaaggtgatgaggagtcaaccatgttagaagagtccgtttccccaaaaaagtaagtattatgaagagtactagaggaccaccttctccctagataggtaggtttcctcttgccagcttggagcctgctgctctgaagcctgtcacctggagaagatgacagcagatgatatagttgaatcttcttcaagcgtggtccccagaccagcagcattgaagtggcagacgtctcgtgagggaggctgaggattttagggaaacattgaccaaggtgtggcattttaactgcgtcttttgaggcagtaagtgttcatgagtcctgttctgcatttctgatttaaatctcatgatcgaatcatgatcattgagccgtaccgtcaggaggtcagaggatgagcctctgtttgattctggccccttttgtgggaggagggagtgcagccagtggcggagttacggtgaagcactgctgcatgccacgcttgtctcgagtgctgtgaggtagcatagtgcaggcgagtggttaagaatatggactcaaatctggggtctctgtttcactgtgtggccctgggaaagttactaaattctcttctggcatgagcttatctataaaatggggataatgatattaccacctaagtaggttttatttccatggtagttactaataaagcacataaaacaatgcctggcacatagcacttgctattataactatcatcctcatgatcattgttttaaattcatggtattctta

SEQ ID NO: 2168 - DNA, 200 bp, Homo sapiens
  misc_feature (1)..(200): DMR15:62893401
gtgcttgaaaaatatatatattctctattttggtgcaggcttccgtatttctatattggagcaagtttactaagttatctcttcataccttacatatccttactcttcatatcttacatatccttactcttttatacatatccttacccttttttttttttttttttttttttttttactatttgatctgtttggtcctg

SEQ ID NO: 2169 - DNA, 3000 bp, Homo sapiens
  misc_feature (1)..(3000): DMR15:62910401
gaggcaggagctccagacctgcacccactttgcaccagagcatagaagcagagccaccttctggcatggaaggccttggctgaactgtcttaacgttaaatgctataggatcctccgtctctttagggcaccaggagccctggagaaagacacagcccccagggctcaccccattcccaggcccaccccattcgcactcccaggctggcaccactgtggctgctagggctccagttgaaggtcaggttccaagtgtggaaggagagccacacctggcggctgccttggatgatgaagggcatagtcaatagggccattgcactcgaactccaggccttgctgatggcgcaaacaatgagactcatcctgggcaagtggactgacttctgggccagcctcagtcctgtgtgaggaggtctcatggtctgtctataacaccagcaaaacctgcatgtctgcctccttcccctccccatacatattttgtctcctcctaccctccttgtttttatagttgcaaatgcacccagctaaattcaggtccagagacacagctttgcaactgacaacaggtttcattttctctaccaaggaaaactaatggcttaagtaaaaatgagcatgaagaggatgatgatgatatcaagatacagacagtgagatggtccttaaatgagagaatataattgttgttgtcaaatgttgcctctctctctctctctctctctctctctctctgtgtgtgtgtgtgtgtgtgtgtgtgtgtgtgtatgtgtttattgcaaggaaacttcttgttagtttatttggtctttataaaaacccagaggacagtggaaccaatgacagtctcagtgggagatgaggccactgaggtgcagagaactggcattatccaaggtcactgggccagcacacagcagaatcatgacggaaacccaggtcttgtgccatctgtgccccacctcggggtccagcactgccactgggctctcagcaaagcctatggccaagccccttgggcaatgcgcttcctaattccccatgctggcagctgcggatgacacacattctgtagcatgtgccccccgtctgtggtaaggcgcatgtgataagacgcatgagggtggatgtgagctccaggggacatggacctccctagccttgcccactgctacgttcccacatctagagcagtctggcgcatagcaggtgcttcatgcatatttatggagtgaatgaatgctcgacttccactcttcctaaacaagactgataagctgtccaggcaggagaaggagtctgcattgaaggagcaccttctccgttgggcagtccaccatgctgatctcatttaatcctcgcaagagcacttggaggtgggaataactttataggcagagaatctgagactcagtcttgctgaaggtaatacaattaataaaattaataactgaccagaccgggactcaaaccgaggtctgactgagtctaggctgtctcctttccccactgagccacaccaaccaccttccaaggtccttagagtgcacgtgtttgcggcactaaaccctcttttatctgcaaggcagccatctgcctgtggtgctagctgtgcaggctgaggtgatctctctgccttatcccagggcaccctagctgcaagcagaagagcaatagctatagcatcagagctctggaaaggagtgaaggcaattgtgtgtgtatgtgtgtgtgtgtgtgtgtgtgtgtgtgtgtgtgtgtgtgtgtgtgcatgtatgcatgtgtatatgtcaagcctgaattccaactggcaggataaattcccagcacttagtaggttctgactatacattagtgggattaattcactggacttgttgaatagtattagtgctcgtaaggaagaacaatccaacattgactattcagcaaaataacaatcacccttcttaatgctattgcacttttagcttccgaagtacccacaggtactttatctatttaccttggacccaaggagtaggtaaaccttgctcccatgtaaacagacaaaaaaaagttaaagcagagaagttctatgatctggccaaggacctgggagctgttacgctgcagaggcagagcatagccagactctggtatcatcaggcctttccagcagcccacacttagccccctactctcctcctccctttgcatttggtcagcagacctctgaacctctgccacagaagagctgtgaacagaccaaaaagttatctcaattttgtatccttacagcaatcatcaacctaaactcatgaaacctacttttacaaacagcactagaaagacaggcttcacagagagaaggattagaacctcagggaaatttcctttcctttttctttttaaaataaaaaagcagtttgttgtatgtgcacagactattgtgcagtgctggaaaaacctacttctccaaggcatccctggcagaagctggtttgcagatctcaggagtggaggtggggagaaaacctgcagctgttaatctgccggctgccctgctagaatgtgaattggaaactctagaggtcaagaggagaacagctttctctcaagtttattccccaggcagctagtgttactcagacaatgctgattgcccttttgcctgtgatggaccggcacccggccctggtcccagatatgtgtgagccactgcaaagcagtctttcagcatcagcgttaaatgcctttctaaaataacatcactcaaattttatgtgcaaagcagctgagaagagcgggaggcccagccatccttctagcctacaggtgaaagtgttaccatcaatggtgtgaaacccactcacaggagtaaaaggcccttgtctattacacttttccaagtgagaagagttcctagctcggatctttgggctgatgtaattatgtcccaggttacttcccctcttctccctccatcttgctgctctccatagaaagcacaggttt

SEQ ID NO: 2170 - DNA, 200 bp, Homo sapiens
  misc_feature (1)..(200): DMR15:63356301
gagaatcgcttaaatccaggagatggaggttgccgtaagctgagactgcgccactgcactccggcctgggtgacagagcatctcaaataaaaaattaaaaattgtagtaaaatatacataacagagctttttcattatctcaaacatttattgttggtgggaacatcaaatagtttggcggtgccttaaaacgttaagat

SEQ ID NO: 2171 - DNA, 900 bp, Homo sapiens
  misc_feature (1)..(900): DMR15:64494901
ggtctttcctcttaagaaatggcttcccagtcttgtaccatactgtgctctgtagtacatcctttcagtttattaatatcacacttaagatgtggaatctggaaatgagcatagatcatcagatgtttttttcgcctccagctaccgtttcagaaaaagtacaatttttaaaaagtgtaatggcagtatcacttgcttactagaaaaaaatcccaaaaaacaaaacaatttgccatggcatatggaattggaacaagaggaatttgaaaaaatatcagctttataacttacggtttgtctttccttattgttaaggctttttgaggtacattatcaaagtactggttttccctcacatattattcagggataattgttaatatctgaattgagttttcagcttacaaagtgcagttgatatttgtatttataggaattatttaaatttatgctacattgaactgattttagtatttcaggtagttttttttgtttgctggttgaattttttcagatggcatctcgctctgtcgcccagtctagagtatagtggcacaatcttggctcactgcaacctctgcctcccaggttcaagcaattctcctgcctcagcctcccaagtagctgagattataagatgtactgtcacacctggttaattttcgtatttttgtatttttagtagagaaagggtttcgtcatgctggctaggctgatctcaaactcctgatcctcaagcgatccacccacctgggcctccaggtggaggcccagaagtgctgggattagccactgtggactactttctttatgaattttaattgatactgcattttttgtttccttgtatcttttttttttttagtgttaaatccttttgtcctttcaactaagttacac

SEQ ID NO: 2172 - DNA, 900 bp, Homo sapiens
  misc_feature (1)..(900): DMR15:66808501
tgctgatctccattggacaaacattgcagggctgacaagccacgtgaatgttccatttagctgctgcacccccgcctacccggtgtaccttccttcagatgccatcacctcagcggttggcctgtgaggccggagcgctggcacacagtggctacggtggcaccatgtttggtggtcatgggacctcaggaccttcctgcacgctgctggcactcatctccccaccttggcgactactccatagtcaagtcccacaacgacaagaacaagaagctggaggaaggcagccccgggtacaacccccctgaagaggcgccagtgaagtctgtggggcggagggtcctggacgggctgaagcactgttaccacagcttcagccttctctggatggacaccaggacagccacacactcgctctgggggattctcagtggccatatgctgaaccaccgggagcacaggcagtttgtccgtgtccgtgctgacctcttttgcctggtcccgctcctcatctttgcagtggtgcttttcatggagttgctgttgcccatcatagtgaaaatctttcccaacatgttgctgtccacatttgagacccagtccatcaaggaggagagaccgaagaagcagctatgggggagctggaactggctacatttctccaggacaccatcgaggagaaaagaaaccaaggggaggactgccaaagccttctccatgtttttccagaagatccgagagacaggaaagacctaacaatgaagaaatcatgcgctttcccaaattatttgaggatgagctgaccttggataacctcacctgccagcagctggtggcatttgtgtgagctgctgggtctccaggccataggcaccaacaacttcctatgcttccagctca

SEQ ID NO: 2173 - DNA, 200 bp, Homo sapiens
  misc_feature (1)..(200): DMR15:67337601
agcacctagaaccatatccagcattttgtagatactaagtgtagattgagtgaataagaaaatgaaagaataagcaagcgagtgaccaaatactgaatgtcctaagtgtaaccatctctactgttccctgctatttaatttaattgaccaaagtgttaaaaaatgcctaagtggatccctttcctatctcaaatataact

SEQ ID NO: 2174 - DNA, 1400 bp, Homo sapiens
  misc_feature (1)..(1400): DMR15:68030801
tgattaagataaagatcttgagatgagagattatcctggattacccaggcaggaccaatgtagtcacccattgtagtctgtagtcacactctgtagtcctcagaggtgacaaagagaggcatgagaatcagagggagatttgaaggtgctatgctgccgtctttaaaggtggaggaagaggccacaaaccaacgaatgcaggcaatatttagaagccggaaaagacaaggaaaaagattctcctctaaagcctccagaaggaatgaagctctgctgacaccttgattttaatctcagtaaagcccgttttggatttatgacttcagaactggaagataatatgtttgtgttgttttaagccactaaatttgtggcaatctgttatagcagtgacagtaaatttatacagttagcttaccgttattgaaagattgagatgtcgaaaggggacactgaggtaagggaggagctacaggaggtggcttccacccctagggctgggagaaaagggaattagccaggctcatttgaacccagaaacgtggaggacagaccctgtggaactgggacccagacctctgaggagtgggcactggcatactggtgctctgaggagcaccctgaagctgattctgggaatatggagaatactggaaactgcaaccagctgctgctgccggggtgaaaaattactggagctactctgacaggaacaggaagcctttaggaagcaaacaggagatccctcctccaacttccctctctgcctccagtacccgctatgaacagagtgtaacaacagctgacaaagcagaaatgaggtttgtggagtctcagccccagcatcacaaagcagaatgccaagatttggagctgagactagtaacaagtatacaatgttaactatgtgtctgcatcattatgctttttactctatgctgacacaaatttacatttattctaggctttcccttctctttcctatttagtaaaaatgtggtcatatacactttactctgaaacttatttgtgttattaaacaatatatcatgcatacctttccatgaaagcatattagagcagtctcattttaaaaaaattacccagtaatatcccatccagacatcagaaaattgatccattcatttccagtgacaaagatcctttgcttgaccaaacttttagtcaggctcctgaacctcctcctaagcccatccatgcactttcttgtacaatccagtttcagcaaagaaccctgctaagtcaatttagcaagaaccccctaccctatccagtcaacctcagtatctgatctggtttcgtttcttatcctctgaagtctgatcaccctggcctgtcttcagatagaatcatgttaggttggtttctctagaatcctt

SEQ ID NO: 2175 - DNA, 2000 bp, Homo sapiens
  misc_feature (1)..(2000): DMR15:68059101
ttaacaccattctcctgcctcagccttcggtgtagctgggactacaggtgcccgccactacgccccgctaatttttttgtacgtttttagtagagacggcgtttcaccgtgttggtcaggatggtctcgatctcctgaccttgtgatttgcccgtctcggcctcccaaagtgctgagattacaggcgtgagccaccaccgcgccaggcccagattattctcctttttttgcagtgtgtttgcagacatgtaccaaagtttgcagatgttttattttaactaaatatattgatatgacagatcttttttgtgctttagaaagcaatgcaggaccggatgccatggctcacacctgtaataccagcaccttgggaggctgaggtgggcggatcacgaggtcaggagttgaagaccagcctgaccaagatagtgaaaccccgtctctactaaaaatacaaaaaattagctgggcgtggtggtgggcgcctgtaatctcagctactcaggaggctgaggcaggagaatcgcttgaacctgggaggcagaggttgcagcgagattgcgccaccggactccagcctgggctacagtgtgagattccgtctcaaacaaaaaaaaaaaaaaaaaaaaagaaagcaatacaaatgtttattttatttttgtagagtcaggggtctcactgtgttgcccaggctggtctcaaattcctggcctcaaacagtgctgcctcggtttcccaaagtgttgggattacaggtgtgagacactgtgcctctgtgctcggtttttacaggtgtgaggtactgtgccactgcacccactctacaaaattagctaaaatgttgtcagtgaaataaattagtcattcttggtttgttcattgtcatacctttattgtttatgtttctgtaatatgtgagataagattattaaatgatggcagatacaggttttacaaaatgtaagcaaacattacttcagcatcagaatgtttgataaagtatgaaatcgattatgaagtagtattttataatctattcatactattctatgaatagtagaatttcaagtaggcaagtatgtttgattttggaaattatatcacagtgaccacatattgcaagtttttgtaccttatttagatgcttatcagttttttttgttttgctgggattacaggtgtgagccaccacgcccagctgatgcttatcagtttttaactggcattttaaaactatattgaacattgccagacgtggtaatcccagcactttgggagccaaggtggacagatcacgaggtcaggagttcgagaccagcctgaccaacatggtgaaaccctatctctactaaaaatacaaaaattagccgggcgtggtggtgcgcacctgtaatctcagctactcaggaggctgaggcaggagaattgcttgaacctgggaggcggaggttacagagagctgagaccgtgccactgtactccaggctgggcgacagagtgagactccgtctcaaaaacaaacaaacaaaaaatcccccaaaaaacaaacactatactgaacattaatatagagaaaatggaaataagactttaccatatttttaatctcaaaacaaagtgttgccatttaaattgggaggtaacatagtttcaaggatccacaatctctgcctccggggttcaggcaattctcctgcctcagcctcccgagtagctgggattacaggcatgcgccactgcgcccagctaatttttgtatttttagtagagacagggtttcaccatgttggccaggttggtctctatctcttgacctcgtaatctgcccgccttggcctcccaaagttctgggattgtaggcgtgagccaccgtgcctggcccaggatctggttttagaaagataacataggcaatgaaagcatttttatttttagaaaaaacctttatgagttaaaccaattaataaatgcatatgtgaattaagaatgctatttgtgca

SEQ ID NO: 2176 - DNA, 600 bp, Homo sapiens
  misc_feature (1)..(600): DMR15:69387601
atccatgcgtaggtgaggacagtgaggcactgtggaggtaagtgacaggtcacacagctgtgcatggcagagccagagtgaggactgaagcccatgtggtccaccaccaacctgtcccctgccttcctccatcacgggcctcactgtctgtctgtgtaagagttcctcttgttgccatggtctcccttctctgtatcctcccataggccattccccagaactccctcttcccttccctgcaggctgcaccacgggagcctcaggggcccctgccctgtgcccttcctccaacccccagacctggatatacccccaccatgattcttctgatccccagcctgccagccatgctggcacacctccattgctgagaacaactccggagcacagaagatgcttccaatctgtttttctagcccatagcccagtgcttgatgtggggaagtgttcaggaaacacggaaggaacatctagtccactgagagagccattgattccatctgggactcccggctccaccctctgcccctgcctccctcctccctccctgtcaaagccctcaatcccaccagtgtagcgccctcctgccacctcccaggc

SEQ ID NO: 2177 - DNA, 4000 bp, Homo sapiens
  misc_feature (1)..(4000): DMR15:71416701
attttattttattttgttttgttttgttttgttttgttttgttttgttttattttattttattttattttattttcgagatggagtctcactctattgcccaggctggagtgcagtggtgcaatcttggctcactgcaagctccacctcctgggttcacaccattctcctgcctcagcctcccaagtagctgggactacaggcgcccgccaccacacccagctaatttttttgtatttttaatagagtcggggtttcaccatgttagccaggatggtcttgatctcctgacctcatgatccgcctgcctcagcctcccaaagtgctgggattacaggcatgagccactgcacctggccctgcccattttaaaatcagattattagatatttttcctatagagttgtttgagctactatatattttggttattaatcccttgtcagatgggtagtttgcaaatattttctcccattctgtgggttgtctcttcactttgttgattattttctttgctgtgcagaaactttttaacttgatgtggtctgatttgtccatttttgctttggttgcctgtgtttgtggggtattactcaagaaatctctgcccagtcctatgtcccagagagttcccccaatgttttcttgtagtagtttcatagtttgaggtcttagatttaagtgtttaatccattttggtttgatttttgcatatggtgagagataggagtttagtttcattcttctgcatatggatttccagttttcccagcaccattttttttgaggagactgtcctttttccaatgtatgctcttgacccctttaatgaaaatgagttcactgtagatgtgtggatttatttctaggttctctattctgttccattggtctatatgtctctttttatgccagtaccatgctgttttggttactattgctctgtagtgtgatttgaaatcaagtaatgtaattcctccagttttcttccttttgctcaggattgctttggctcttcttaatcttttgtgattccatataaattttaaaattgtgtttttctatttccgtgaagaatttcattggtattttgataaggattacattaaatctgtaattcgctttggttttatggacattttagcaatattaattcttccaatccaggaacacagaatatctttctattcctttgtgtcctcttcaacttctttcatccatgttttatagttttcattgtagagatcttttacttctttggttaattcctaggtattttattttatttgtagctatagtaaatgggattagttttttgatttctttttcagattgtttactattggcatatagaaataatgtatatttgctgttcccatatagaaatgttactgttttttgtatgtcgattttgtattttgcaactttactgaatttatcaattctaatcatttttggtggagtctttagtgttttccaaatataaaattttatcatctgcaaacaagggtaatttggcttcgtcctttccaatttggatgccctttatttctttctcttgtctgattattctagctaggacttccagtactacattgaataacagtagtgaaagtgagcatccttgtcttgttccagatcttagaggaaaggcttttggtttttctctattcagtatgaaactggctgtgggtctgtcatatatgacttaattatgttaaggcatgttccttctatacccaactttttgagggtttttatcatgaagggatgttgaattttatcaaatgcttttattgacatcaattgaaaggtcatatggtttttgtccttcattctgttgctatgatatatcacattaattgatttgcctatgttgaatcatccttgcatccctgggataaatcccacttggtcctgatgaatgatatttttattgtgttgttgaatttagtttgctagtttttttctgaaggatttttacatcatgcatttggaagtattccctcctcctttatttttttagaatagtttgaataggattggtgtattaaatcttctttaaatgtatggtaaaattcagcagtgaggctattgggtcccaatcttctttagtgggagactttttattactgtttctatctcattacttgttaattggtctgttcaagtattggatttcttcatggtttaatcttgataggttgtatgtatctaggaatgttattcatttattctacattttccggtttattgacatatagttgcttatagtagtcactgttgatcctttgaatttctgtggtatcagttgttatgtctccttttttagctctgattttatttatttgagtcttctctctttcttagtctgggtaaaggtttgtccattttatcttttcaaaaaccaacttatcattttattgaccttttgtattgttttcttcatttcaatttcatttatttctgctctgatctttattatttcttttcttttcttttctttttctttttctttttttttagacagtgttgccctgttgctgaggctagagtacaggggcatgatcacagctcactgcagccttgacctccaggatcaagcagttcccccagctcagcctcctgggtagctggaataacaggtgcacgccaccacatctgactaatttttaaatttttgtagagatgggatctcgctatgatgcctaggctggtcttgaactcctaggctcaagcacttctcctgccttggcctcccaaagtgctgggatataggcatgagcaccatgcctggtctattatttatcttttactaattttggggttttttcttgtatttctagttctttaagatgcatcaatcggttgtttgtttgaagtttttctacttttttgatgtaggtgcttataagtataaacatccctcttagtactgctttcagtgtatcccatagattttggtatgctgtgtttccatgatcatttgtttccagaaattttgcagttttcttcttaatttcttcattgacccactaatcattcaggagcaaattgtttaatttccatgagtttgtatagtttccaaaattcctcttgttattattttctggttttattccattgtggtcagaggacacacttgatgttatttccatgtttttgaatgttttaggacttgtttggtggcctaacatatggtctatccttaagaatgatgcatgtgctgaggaaaaggatgtgtattctgcagctgttggatgaaatgttctgtaaatatctattagatccatttggtctgcagtatagattaagtttgatgtttctttgctgattttctgtctggatgatctgtccaatgctgaaagtgtggtgttgaagtgtccagctgttaatgtattggcatctgtctcttttttttagttttagtactatttgctttatatatctgggtactccagtgttgggtgcatatatatttacagttgttaaatcctcttgctgaattgactcttttatcaaataatgacattctttgtctctttttatagtttttgcgttgaaatttagtttgtctaagtatagctactcctgttcatttttggtttccgtttgcatagaatatctttgttcatccctttattttcagtctatgtgtgtctttatatgtgaagtgtgtttcttgtaggaaacagatgtatgggtcttttttttttaatccattcagccactctatgtcttttgatttgtgagttttgtccatttccattcaatgttattattgatagttaatgacttatttctgccatttgttattcgttttctgattgttttgtagtcttctcttctttccttccttcctgtcttccttttagtgagggtgattttctctggtagtatgttttaatttcttgagttttgctttttgtatatctgttctatgttttttggtttggttaccatgaggcttgcaaataatacagttcattattttaaactga

SEQ ID NO: 2178 - DNA, 400 bp, Homo sapiens
  misc_feature (1)..(400): DMR15:71797501
gtcttggagttgctcttctcgaggagtatctttgtggcgttctctgtatttcctgaatctgaatgttggcctaccttgctagattggggaagttctcctggataatatcctgcagagtgttttccaacttggttccattctccccatcactttcaggtacaccaatcagacgtagatttggtcttttcacatagtcccatatttcttggaggctttgttcgtttctttttattattttttctctaaacttcccttcttgcttcatttcattcatttcatcttccatcgctgataccctttcttccagttgatcacatcggctcctgaggcttctgcattcttcacgtagttctcgagccttggctttcagctccatcagctcctttaagcacttctctgt

SEQ ID NO: 2179 - DNA, 200 bp, Homo sapiens
  misc_feature (1)..(200): DMR15:72893201
ctgaactatgagtgtcctataattaaggctacttttcctttcctgaataaggttttatttgccctggaatgacctgtcttaatttttctatttgcttagtttttttgtgcattattatcaccaactcaagcccaaattctcagttgcttccccaaatctgctcacggtatctccagatgcatcagcaatttattcaagtt

SEQ ID NO: 2180 - DNA, 300 bp, Homo sapiens
  misc_feature (1)..(300): DMR15:73771801
agtgggcccaggagggaccggatgattcggggtagatgggagggagtgagcaggaggggctctgataggctgcatccctggggtttcctgcacatcccagatgctggcacctgctctgggcctgggccggcaatagctctgtgtctggctctccaccgggccttgggtgcatcccctgattcccccagggtcttctcacccgactctccatgggatccattttcaactctctgtgttccctcaactactaggcagccagctagagtcctcacctcttcagaaaagctgatactagttaag

SEQ ID NO: 2181 - DNA, 300 bp, Homo sapiens
  misc_feature (1)..(300): DMR15:73775201
ccagccagcaggagggcggcactgtggaggaggtggccactttctcagttgctttgaagggccaggcaaggccaggcctccaagaccttcctccgcgggtctgtggtcaaggccttgtcacctgcttaaggggagcggcctgttgagagagccatcactgaggccctgggccctggtgggattcagttggcagggcagtccctgagggctgtgggcagtgcggcaggggagggggggggaggggttactgccctcacgagtggggagcactagcacttgggagagggaggctgaggagta

SEQ ID NO: 2182 - DNA, 1300 bp, Homo sapiens
  misc_feature (1)..(1300): DMR15:74048001
gagtagacaacaagctttctatgtggcagctcagcgaagccctgctccagggtctccttctgaggcctgaagtcatttaaaaatctgctttgcccctaaccccaacctggctcttagctccagcagctgtcacagagcctggtcaggctgttttcccaccctctacttccccttgtcctggcccatgtccacccttctccctgcccatgtccaccattctccctatcccagcctcactctgactcctggccccaaccctgaccactctccatgcctcagagtctcaccctcagcctagccctgccagcaggccccatctcctcctctgacctcagccttgtctccgcctcacaccccaggtgcctccagcacctaagcctagagtaaggggctcccttctcatctttcctcactcctcacaattaaggaaactccatggctagtgtgcataccacccgggctggaatgcaccaaatgtcaagtcaaagggggtaggacacagggaaccctgcctggcgagaaggggagctgagctagggctgctcccggactctgccagcagagggcgctgcagcgcaccccccctccccccccccccccccgccacccggtgcctggcaacgggcatgggccacggtagtgctggtggtgctggtggtttaagctcaggcagctcagtcctttctaaagtgctatgcgtgcttcctgtggtatgggagataactgtagatacgaggcacgtggagaaacatttttttaaaatgttaaaccttttatatttagtttaacatctgttagaaacaatacaaccaggccatgcgcggtggctcacacctgtaatcccagcactcactttgggaggccgacgcgggtggttcacttgaggtcaggagttcgagaccagcctggccaacatggtgaaacctgtctctactaaaaatacaaaaatttgctgggtgtggtggcccgtgcctgcaatcccagctattcgggaagctctgaagcaggagaattgcttgaacctgggaagaggaggttgcagtgagccgcgattgtgccactgcactccagcctagatgacaagagtgaaattccgtctcaaaaaaaaaaaaaaaaaaaaaggaaaaagaaaaaaagaaacaatacaaccagctcatcgaaagtctgatttctggccaggtgtgatggctcacgcctgtaatcccagcactttgggaggccaaggcaggtggatcatgaggtcaggagatcaagatcatcctggctaacacagtgaaaccctctctctactaaaaataca

SEQ ID NO: 2183 - DNA, 2600 bp, Homo sapiens
  misc_feature (1)..(2600): DMR15:76270601
tttcttcagcaaaaggaaccaggattccttggagaaaggactggttccagagatgggacaggaaaaatacaaaatgagcctggaacatcttgtcttgtcaggaagtaaaaaaggattcaaagaatgatgggaacacatcaaaaagacacagaggggcctctcactagccaaacatgggacaattcgtacatcaataataatgacaaccatagatttttacccattgaataaaataggtaccataagtccatactgatataaacaaatgaataaatcaaaagtttattggccgggcatagtggctcatgcttgtaatcccagcactttgggagaccaaggtgggcggatcacttgaggccaggggttccagaccagcctagccaatatggcaaaacccagtctccactaaaaatacaaaaattagttgggcgggttggtgcatgcctgtaatccaagctactcaggaggctgagacatgagaatcatttgcaccctgaaggcagaagttccagtgagccgagatcacaccactgcactccagcctcagcgacagagcgagactatgtctcaaaaaaaaaaaaaaaaaaaaagtttgaggaaaactgggatatttacatcatttcaaagtacctccatataaaatatgtattacaatgggaaaagtaactttacagtggagaagttggcacatattgccttaatcaaaggattaaagtgaaaatcattaaatgaaagaccaaatgaaattgtataccatctgataggatgaggtatcacttctgtgatattcctgttcaagatatataatctaaattgaagacattagacaaatccaaattgagggacattctataaaacagctgtctggtaatcttcacaattccctcatgaagtgaaggtaagactgtggaactattaatatttaagattgaaggacacatgacagttaaaatgtaatatgtgactctgcactatatccttttgctataaaggacatttttggaataacaggcaaaacctgaatgtcagggtctgatgcttagatggtattatgtatcaatgttaatatcctaatttaaaaagttgtattgtagttattaggaaaatgtcctatataacctatttggggatgatcacagcaacttactcaaatggcccataaaaatataggttttttgttctctacttgtaagttttctgtaaatttgagatatagtttccaaaaaaagtttcagatccttaacaaaatgtacatacataaattacgtgtgtatatatgtatatgcacatatatgcgtatatgtgtgtgtatatacacacacacacacacacacacacaccctgagttaatgaatcaaaattctctcggaggctgtatagtttatgtcaaagtcttcaaagcatttaatatatttccttatgaaaaaaaatttcgatggttctatatccataagagtaatattgaataatgctgatggtatgccatttattttcaatataggaaaggataccaccagccactccctgccactctgctcttctatttgataaccacaagcactctctgtcagtcaaaataagtctctgtcacttcagtgtatatctctgaatttctttctttcttttttttttttttttggagacagtctcgctcttgtcgcccaggctggagtgcagtggcacaatctcggctcactgcaacctccgcctcctgggttcaaacaattctcctgtttcaacccccacagtagctgggactacaggcacatgccaccacacccagctaattttttgtatttttagtagagacggggtttcaccatattagccaggatgatctcaatctcctgacctcgtgatccaactgcctcagcctcccaaagtgctgggattacaggcttgagccactgcgcccagcctgaatttcttgtagacatatttttggttaagaaggttgtgggtctgctgatcttttatgaaatcagacctacagatgtctacttatgtaaaattgaaagatttccacaaataatgtgtgtgccagtcaggcatggtggcacatacctgcagtcccagccactcaagaggctgaagtggcaggattaattgaggctaggagttagaggctgtggtgtgttatgatcatgcctgtgaccaacccctgcactccagcccaggtaacatagcaagaccctgtctcttaaaatatatacatatatatatatatatatgcgcatgtgtgctagagctcattaaatgtcaaggaaggctcaagctcatctgctcaataaatccactctcacagcctaattcggtatgacaagcaaacaggccacatgatgatgtgacttaatttatgaatagttctaatatgtattttaagctttaaatcttcttttctgacttcttttctgacttcaagtaagttgagtaacacaaaacgtattaagcataagaagaaagactggtgcattaggttatcaaaattagaaatctctactcatcaaaagaaaatgaataggaagtcctagcatgggaaaaatacaacacacatctgacaaagaatttgtatgtaggttatataaaaaactcctacaaag

SEQ ID NO: 2184 - DNA, 400 bp, Homo sapiens
  misc_feature (1)..(400): DMR15:76687501
ttacacaggtatacacacgccatggtggcttgctgcccccatcaacccatgatctacattaggtatttctcctaatactatccctcccctagcaccccatccccaacaggccccggtgcgtgatgttccccttcttgtgtccaggtgttctcgttgttcagctcccacttatgagtgagaacatgcggtgtttggttttctgttcttgtgttggtttgctgagaatgatggtttccagcttcatccatgtccctgcaaaggacatgaactcatccttttttatggctgcataatattccatggtgtgcatatgccaccttttctttatccagtctatcactgatgagcacttgggttggttccaagtatttgctattgtgaacagtgctgcaataaacat

SEQ ID NO: 2185 - DNA, 1500 bp, Homo sapiens
  misc_feature (1)..(1500): DMR15:78334201
aagtgggttctatgaaacaccagtcctacaagattctccagatttaagactcaatatgtttaggaaatggtgcacaccaatggccctcttcaagactaataatgtacactcacatcttaaagacggctttatcgttttcctaaattgcagtatcttaatctctgaccatgcccaccttcctgccccagcgcaccaatcgttcgccctcacaggacttccaggcctttgagttcctccattttctccctgcctagcaagccctgtcatggctcaacttccatccctcttctgcccagaactcctgtcctacacctcaaccccttccgtcatcactctcagttgctctgctcttctctgtctctgcttcagttcacatgcccactattccatcacctatatgttggagtcccagatctgctggagaaaagcacattccactgtgaaatctggagccagcccctgtcctgctctccaaccttcctggagccgttcctggtgaggcaggtgggagcatcatttctgtgcaccctgagtcacctttcctatttttagaaggggctcttccaagctttctccaagagccccatcttgcaacttttccctccttctttgcagaagacccctctcttacctaacagagaaaggtaaggacacagacgggaacaccttaacttctggttcctttacctggaaggcagacacctccacttgcactctgggtctcctcctctcccatctctaccacttgtgtccatcttctatttctcctgcaccttctgtcttttctttagtctctgccttcaccttgtacatatgttcaaatccctcccatctgaaatgcaaacaacaaaactctgaatagtcctttggtgctacctcctctcataactttcaattcatctctcccctcccctacagtcatgcttttcaaaagagttgtctacattttctgattccaatttcacgctttcctttccaaactcaacctgttgatcctgccttcagaccccaccacctcctaaaactgctctgactgcagtcacgaagaccgtcctgctgctcatccagaggacacgtggtggcccttgcctccatgaacctctttggagcagttgttactgttggtccatccctcctttttttttttttagatggagtctcattctgtcatccaggctggagtgcagttgtgcaatcttggctcactgcaacctccacccactaggcttaagtgattctcctccctcagcctcccaagtagctgggattacaggtgcctgccaccacacctggctatttttgtatttttagtagagatggggttgcaccatgttggccaggctggtcttgaactcctgaactcaggtgatcgacccacctcggccttccaaactgctgggattacatgcatgagccactgcacccagccaatccctccttttaaaaaatgctgggctccttgactgggaggacatcaccctctggttttcttccttctcc

SEQ ID NO: 2186 - DNA, 200 bp, Homo sapiens
  misc_feature (1)..(200): DMR15:78886901
gcggagatcgcgccactgcagtgtagcctgggcagcacagtgaaactctgtctcaaaaaaaaaaaaaaaaagaattaaaatggtaatgggaacaaataaaacactgggattagtgaattccaaaacaaatggaattttcaatgctatgagaacagtctattacagtcactttttattacattgattttaattgagccttt

SEQ ID NO: 2187 - DNA, 1700 bp, Homo sapiens
  misc_feature (1)..(1700): DMR15:79845301
gccaacgccagggtgtagggcttcacttcctgatgctgcaaacagcgcttcagataggcatcatagtagcccttgcccctccccagtcggttgccatgtttgtcaaacccaaggcctggcatgaagatgagatcaagtccccctgcggaaaagaggaacaaatttaagaggattaattgtttctgaaagatcatttcaggatgtgttttttgttttgtaatgacatcaattctttctctgatttctaaaaacaatgtgtgaccattaatatccaaaaagcacagagttggacaaaaaaggaaataaaacgtactcagcaacttagttaagtctcttattcatcctcaacagatcttttacatatatctgtacaaaagtgccagattcccaggcctcattcataactagttaaatacagagaatctccagagatagggccctcttttttctagcatcctggtgattctccatacctgtcaggtttggaaatcaataccccaggataatgacagttggagggcgggaaacagtcaaggaggagccataaaggacaaagctgtttctcagggtcagtgagcagaaagagagtccactgtcaggcataccaagcagttcagacagcctactccctcctcatttcccctcccattggagaggcaaggccaggctgccgggcttccccagactcgtgtgagagcaggctttgacctactcaaggaaaggtacaagatggggacccacaactagttctctggctacaaccctctcaagtaacacgaagaccagaactggctatgacattatcaggacagaatgctggagctcagggtgggaggcagggtcctggaggctataaaaacccaactgcagtaagggtgtgtggggattcccatgaagatggcaatgaaggtcactaggtgaagaacctccatgagggaatggtactccagcctctggcaagaaacatggggtaccagtgtcagcataagagccacattacatgtcaaacccagtagtctgccctgtagcctccttatactgagtcttggcctcctgacagctgtcctgggggtttctgggtgacctatagcttagttgtggaataaccattcatatagcatttgctggcaagatataccagggttggaagccatgaattctccagaacagcatgttcagagtagagaggatcagactgccaacatggctagcccccactatcagcagatattctgactacctgcagaactgtgaggtgaactcagcttctctctagctcccagcatacacctggtcacccctgcctgccaaaatccagcaaagcatgcctcagattacagtaatgaccttcccctgtaaacctccttgtctattccaatcccaactttctaaaaaggtcctggtcactgacctctgtctttcctccctgttcctgtccagctcatttgtccctcttgggattgacagtggactgtgaatttggactttactccctcgtgtcctctttctgttgccagagcaccatcaggcttgaagttcagttctgtcttctatacctagaacacacaatgcgcaaacctttctaaggattcctgcctctttacagtatggcaaggtgctctgtaaggtcctctggaggacacacagtctcttcccttcatgaaatggcagttcagttagtacaaaatataaccgcatgt

SEQ ID NO: 2188 - DNA, 1300 bp, Homo sapiens
  misc_feature (1)..(1300): DMR15:80635401
atcaactttttagctcttctggcaagggccttaaacagagtcagagaaaacctctttgtgagtagagaaaatctgaaagaagagagtgaagacacttgaagaagaagttgtcctgcaggtcacagtggccccagtgaatgaggcactgcaggccttggaggagggagttccagagaaaaggttctgatgtagccaaacaggtcctgatgagctagacccaggtggggtaggcatggaagcaaggaaatatcccaggctgggtcacaaggagaaagcaaaagatagaagtgggatctgaagggaagggtcaaaaatggtgagtaggtaatacagagtaagagggttcagaaggcaggccgtgaaaagatccgagagtcaaatggggaaagaagatgtgcaagggcacagaaggagatacaagatcatggagttcatttctacactaccctttttttttctggtgtccccatggatatggtgtggcagtggtggaaacaccctgtggaggtgcttcagatcccagaggcaggttcccaccagcactcagcagatgtactctcctggtgagctaggtactgagccggccgtggtactctgaggagtgcctgacttgcatttcccgtttctgcatctccagcgcaagctgctggcacacagtagtgggacaaaacaaggagcagggagagatgggattcatgcacacatgacttacaacagctggctcatttctgcataagcaagtacagcacatatctctcccacttaaatgagccaaggctgcgcagcacactactgctgttcttggctgcagagtggcctgtgctctgtggccagagtgaccatgatgcacactcagcaggactggggggaggccataattgagtgatggtttattgatccttctggtgggaggagttcaataaggtatatgagaattctttgaaggtcaagttgataatctcatggtgttccatagatatggcaatgaacatatttcacatcctagttggtagatgtcattttgccatctggagttaccaacaactgagtagaccttggtggagccttcttccaaatccaggagtccaacaggctgtctgagagcacgggtatggaaggtcagttcatggaaggaagagcatctcagtgatcatgaagtagaccatagatggaggagctatggtctactcctccaggaactaaccattctggtgagaggaactaccagagggtcctgagcacagtgagatagatgagatggatgggagatcaagtctaggtgagacgggttcccaaaagt

SEQ ID NO: 2189 - DNA, 200 bp, Homo sapiens
  misc_feature (1)..(200): DMR15:84016301
agctgtctttaagaacacccaagctggaccaataattagataatgtctaactggtaaaagtgctacttttttttttcctcagaacgaagatggccagagagtagaatcgtatttctgcaaggacataaaaagtacattctccaggcaaccaacactagaaccaacagcaatgacccaacaggagaacccccgcctcaagg

SEQ ID NO: 2190 - DNA, 1200 bp, Homo sapiens
  misc_feature (1)..(1200): DMR15:84226301
atattttttaaaggtttaccctctcaatctgttaagttcaaaggttaactataatctcttcataagaaaactattggaaagatggaataaaatacacagaaatgtccttaacaggtaaatatttatttttctttcttattattatactttaagttctggggtatatgtgcagaacgtgcaggtttgttgcataggtacacacgtgccatggtggtttgctgcacccatcaactcgtcatctacactaggtatttctcctaatgctatccctcccctagccccccaacccccaacaggccccagtgtgtgatgttccccactccctgtgtccgtgtgttctcactgttcaactcccactacaggtaaatatttctagaatgtatctactccatcagctagtgtaagtattctaaactgtgctagtatagctgctttaaatcactgctttcttctgcaaatggtggcacctttaaagtgttatcttgaaggggaagtgagtgatttgctcatgtctctgctgaactaacactgttaacacccagtccagttctaccttaaacaagtctgagaaatacagacataatccatacttgttatttgtcaagactaaggtaaaataaggaaagttggaactcactcatatcctcttatgactgatgtactgaaaacaatccatctctcaccatttcctaaatagcatagtcacaaagagctctaccctaccaagtactctgcaagtcccactctcaaaggaagactcacaggtgactgagaagataaatttgctattgtttccattatccttcagttcatctgacacctttgaagaaacgcatttggataagactcacaagtctcagggccccttctttatgaaagaaatagctaagcctccatactcagaagcatcagacttttcagaatgcttaagtcatgtaaaaacgtatcaaaattattatcattacagctaccaggaaatagctacctactccatgttagatactgcagttaagtatctcacacagtttcactgattcctaacaacactgcaaagcatgttactaacccttaaggagtaggaagctgaagctctgagaggctatgcaactactcaatggaaatgtggggatctgaactctacctagctccaaagggcgtacttttttctaaaatttctaatttttttccaatttcacaatg

SEQ ID NO: 2191 - DNA, 100 bp, Homo sapiens
  misc_feature (1)..(100): DMR15:85210001
gtaaccttgagccagcccctccccagaggggaatgagctgttctttattttgaattttaagaaccaagatcttgctatattgcccaggcacagtcccact

SEQ ID NO: 2192 - DNA, 800 bp, Homo sapiens
  misc_feature (1)..(800): DMR15:87676801
gagaatcacttaaacctaagaggcggaggttgcagtgagccgagattgcaccactgcactccagcctgggcaacaagagtgaaactccatttcgagaaaaaaaaaaaaaaaaagtatctacaggaaggacatgaagagtacaaaatatgaaaattgaacttctagagatgaaaattacaatgtccgagataaaaaatactctggatgggactaatggaagattagatgggttcttggaaaaaaaatatttagtgaaattgaagaaacagcaatcaaaactattcaaaatcaaacacagaggaaaataaaagactaaaaactgaaaaaaataagagcatcagtaaactgtgggacaactttaaacggccaaatttggtaaaaatgataaacacacatatctaagaacctcaataaattccaagcacaagaaacatttaaaaacacattaaagcatgttataatcaaatagcctaaaaccagtgataaaaacaacatcttaaagcaaccagagaacatacacattatgtacaaaattacaaaactaagaatgacagcagatttctttggaatcaaacagaaggcagtggtgcaacatctttcaggtctgaaagaatttagtgatgaagacttcttcccactctgcttttttgtattagcttcccagggccgtcacttgacaattactacaaaccaggtggtaaaataggcacttactctctcacagctatggaggcttgacgtttgaaatcaaggtgtcaacagagttggctcttcctggaggctatgagggagaatctctc

SEQ ID NO: 2193 - DNA, 2100 bp, Homo sapiens
  misc_feature (1)..(2100): DMR15:88060601
tggggaccatccagaagagcaggcactttgatgggaagcccttggaactgagcacgggggaacagcaggagctaattgtcccttacatcacatggctcaggctgctgtgtgcagaacagaccatgggttggggtagaagtggaagcaagaagccccagtcacaggctattttcatcacccaggaaagaaaagaaggaggcataatccaagtgtaagaagttatttttgctcaaaaaatatttacttttagccattggtatcatcttaaatttactatcaatatatccccaaatttcaaagtgggttatttttgcaccttgatatcagacaagggttgtctgatgtttctctcctctttcctctttccctttttttttcaactattaaaatagtcttcactaagaaaaaaaagttgtttttaatttgttcatctacttccattttttcaggtacttcattgatttttatgttgaaatatttaatacttcaaaaagagacccccttgttgagcggctttcaaatctggcatcaggtaataacttgtttgccaagaaagtcagcttacccccaaccaactaaaagaaaaaaaacaataattcattagagatgcttttaataaaggtaaaataaatgaataaatttaactttcacctgaccatgaaatctggacttgcaacaggaaaagagtacggtcaagtttgaatgcttatccatcaaatggagctccgaggagggagccctgccacggcctcactcccgccactaaatgaattgtctacttgacccccagtggtcagaagggacacggaatgcttgtgctgccctccacaaggtgtggggtgggtcagcccgtggctgctaagagcatcttgaatgcaggcccacaacaggttagaataggctgataatacagagaagcggcacagagcaggagcaggagcagagtggcagccggaacccatgtggcatgcctggctggagaggatgggcccacggacactcacgcccccgcagggcgagggctcactaagccagtccttcccacttcctgcttcttcatctggtgcctggcagggtggcgaactcaggccagagcagacgtcagagaggctgggctggttccagggcccggaggctccgttctggaaccctttcttagagtcccctgtgaggcaggagagcttcatggagaaaatgccagtctgtggaggcactcagagctgggcttgggactcagctctgcctcttcctcatgctgtggcctcagtttcctttctgagcctcaggccccttatccatcaaacgggggtaataataggacaatcgaccttcggtatctgtgggttccacatctgcagattcagccaaccgcagatcaaaaatatttggaaaaaaataaaaattaacaaaataaaaaatcatacaaattttttaaaaatacaagataacaactatttacgtagcgcttacattgtattaagttttatacataatctagagatgatttaaagtctccgggaggatgtgtgtaggttatatgcaaatactgtaccattttacatcagggacttgagcatccatcatccgcagaacggggaggtgggttctggaaccattccctcatgaatactgagggacaactgtagtatatcccacagaggtgtgttacaaggatgaaagtgttttgcgcaagaagtactccataaatgataacagtttctggcattgactagcaggtgcctcctacccctttcccattgttattagctgagcacatgtcttcccaacataaagactacatttcccacctccccttgcagccaatgggatataaacagaagtcttggctagtaattcctaggaagtctccctaaataggatgaagtaggcctatctctgccctccttccctcctgcacatgaaatgctgatgcaatggctggagccctagctgccaatttagccaatgaagctacaaggtaaagatggcagagcccctagataaaaggaccccgatgatcaccaaaccaaaataaaaaccttggactgcctatttccaaacctctttttcacaaaacagaagtaaatgtccattttcaaa

SEQ ID NO: 2194 - DNA, 300 bp, Homo sapiens
  misc_feature (1)..(300): DMR15:88274701
gatgggccttggctggcatctagcaccacctactggccacggaaggaaaagcaaaggtccagctgccacctctcccccagggctcctgcagtcacgccttgcctggatgctgcatcccttcacaccctgattatcaccctggagccccatctcgccacccaagggcagagggcaaacttcaaaggtgacacagacactctgaaggaaacaagaggccacaaagccagctggagcaggcagacacagggacagaatctgtgccctggagcctgaggggcaggctgagagggcggagcagga

SEQ ID NO: 2195 - DNA, 3700 bp, Homo sapiens
  misc_feature (1)..(3700): DMR15:88362901
tgaaactggaaaccatcattctcagcaaactatcgcaaggacaaaaaaccaaacaccgcatgttctcactcataggtgggaattgaacaatgagaacacacggacacaggaaggggaacatcacacaccggggactgttgtggggtgggggcaggggggagggatagcattaggagatatacctaatgctaaatgacgagttaacgggtgcagcacaccagcatgtcacatgtatacatatgtaacaaacctgcacgttgtgcacatgtaccctaaaacttaaagtataataataataaaactaaaaaaaaaaattatgtttttgaccacgtaatatatacagactctgtgattgaaatgtatgattttttatttaatctttaaaacaatcctgtgaagctggtatttatttttatgcttatttttattttttgtttgtttattttttatttcattttttagatgtaaaaaccaagatcccaaaagtaagctatttgcctaaggttacacaacaagtaagtggcagagcaaaaattcaaacttcaaagactctgtgttttctatttaactattctgtttcccaaagagtcactgaaactcatgaagattaagtaatttagctaagattgcacaggaaataacagaactagattttaaaataagttctggccctaaagccactgttttatccagtacaggtgatgattgacagcaacaggtgtattgccggcaggtgtatccctggggcccccacaattggaagaatatgagctctctgagtgaggatgccaagatactcatggcctttgaggctctctggatgtcccatgaacatgacggtgctctttgaatggtagatagttctcaatttaaaaaaaaagaaaagaaaagaaatgccctgccattagatgacttgacctagaagttactccctaaaaattatccacaggtcatcccatctacctggggcatggtgttatggatgttccttgaacacgtagagctgtctgagtgtttgcccaaagagaacattggcatcactcacctttgaaatacaaaagagaagccgtttgctttacttaaatcctgaatctttgatcatccacatcaggtgtctttgatgttggctgcaatctgtaattgctacaaattaacacaaaggtaggaaacaggttaaagaggcacggagaaatgaaataaaagtcttacatctgaacacaggcacctttttttctaccccctttctcctccaaaatgaggcttgttcactgtctcttccttctgctagaagtttcttgaacctatgacttatctgccacatacatttaatcattttagggtccatttagactcttaaaaggagtctcgagtatagtaggccttcaataagtatttgttgaatagatgagttagagacctaattattaagttgataaccattggttaaatttcaggtgccaagtcagttacagacttcccatcctgactgctcaccatgtggaccagggtaacttcagccggagagcagcatagggtgtcctgatgtctggcatgctgcctggtgggcaatcctccatccattaccctgttggttcttccatttggccatcggtccccagtctagggagtgccagaggccaaggcaaccaggagcagctggggcacctcccaggccagcctgtccccttcctgcccacaccaaccaggcagcctcttcctcctgcccactgcttgcaccagcttctctacccagagagatgactgcgtgggcccttggattccacaagcaactcaactcaggacatttgataaccttagccacagaagtgaaaagagaaagcaaggagagaggtggcgaaggagaaagagaaagaggaaatgaaaaacagacatcagtttataaagaaaaagagtttctgaagaagaaaaatcaaggacaaagtgagaaactcttccttcttacaatggatacaatggatttttcccaaacatgttaaattcttctccagaaacttgactgaactgtgacaaagaggttttcatgaactttggaggcagacagacctggtttggactcctggttccagcctctgcttgccctgtggccttcacagcctctctgaagccatttcttcccgcctgtaaaagaggaaaataacctgtagagcagctgtgagaattcagtgagagattggggctgaagagtcactcaatgaaatattttttcctctccttgctctcccactagccctttccccttcctttggttggacttggttgtttccattgtggatttgtctgtttccgctacctctcggaagcacctgaccctggactgcaagctcaggaaagaaatctactgatgaggcccccggtgattataagtgatcacagcctgagcgagcagtcagctgaagatgttccgggcatacatctgccttcagtgctgcagctcatcccaggagtctcgtgagagataaatcagagggagggcagaggggtggggggccagggtcgggcaagcaacagaggtatgtgcagcttcagaatacacagctcgtaaaggaggaagacggtgggaatccctgcatcttgcatgtgctcatgacaaacgtcaaggaggaggaaaggggaagaatgagatggcacaggcacacacatgtgtgtgaatgcaagcctccaggacacactggccgagggtgtgggcccaagggattttccctgcagtccaaagactgggctccatcccacttccactatcctgaggctcttttccctcagtggacttggtctcctcatctgtaaaggaggaagtcagaaaaaggggctctcgtgcctctttgcgctctgagagtctgccacatagagaccccttctgtccaggaccccagatcatggtgccgaggtgaccttgataatgtgctgggtctgacccaggaaagctggaagggtagggggccagagtgcccataacacaaagcatcagtgagcgatgggcaagactgacccagtgctgacagcagcagatgtgaggctgctgaaaacttcggtgcttacacatctggtgccaaatatcctgaactccttgcttccttgtgccagaacccatattttactgagaagccgaagcattcaaggaagtcaacctcaggccttctgtgcccatgcctcagagatgggaaaaggccctggattagactccagagcccagcagggaaagccagcatcctagcaagagcagaacaataaagttaatcatagccacctccagtcatttgtggggagcacaggagagaggcttgcatttcattctccccacagccccgtgagggaggtgctattgagaggtgaagccagctggacttctgggtcaggtgcggacttggagaacttttctgtcttacaatcctcttacaagaggattgtaaaatgcaccaatcagcactctgtagctaggattataaaacgcaccagtcagtgctctgtggcttgctagaggtttgtaaaatgtgccaatcagcactctgtaaaaacacaccaatcagctctctgtggctagctagaggtttgtaaaatgggccaatcagcacactgtaaaatggaccaatcagtgctctgtaaaatggaccaatcagcactctgtaaaatggacagatcagcaggacatgggcggggataaataagggaataaaaggtgccc

SEQ ID NO: 2196 - DNA, 400 bp, Homo sapiens
  misc_feature (1)..(400): DMR15:88930701
tatttctagcctaggcctgtaacattcttgtacatgtcttttggtgagcatatgcctacatatctgttgagtggttacctaggaattgctgaatcataaagcacacacatacttagctgagtagatgctgccagtgttccaaaatgtttgtacccctccagtggattttatgtgttttgttttgttttgtttttgtttcgcatatacaatcaaatccactttgtttaccattacctcaataaacagaatgttgagcaaaagaaaccagacacaaaagaggacatgttctgtggttccatgtatacaaaggtcagaggcaggcaagagtaatcaatggtttagaagtcaaaatagtggttaatcttggtggaaaactagtgatgtagaagtacaagtgggg

SEQ ID NO: 2197 - DNA, 700 bp, Homo sapiens
  misc_feature (1)..(700): DMR15:91198101
tggtgaatctctggtgaggaaaagaaaggagccagatgaaaaagtctgccccggtgcttcaatttttatctgtagtgtttcctttgttttgagagcaaaaggccgaggaagccaatgttaagattagataaagctgggcagtgagctcacggtggttcattatgtcaatcactttctcttcaaatttctgtatttgaaatatttctcaatatactaacattttaaaagaaaatgctttcatcaaggcaccaaggcctattaaaacaaagccattaccttcggcactgaacggatttttctcattgctttttcttctcagtgacagcttttggttttcagccaagaagcacgtgtatgtgtgtgtgtgtgtgtgtgtgtgtgtgtgtgtgtgtgtgtgtaggtgtgtgtttggaggtctcctggaggcaaatgagcacatttgttaaaatggagtattacgtttgtaccagaaacctaaaagcatattttatttaaatgagatgcagaatatattaccttaatgagtaaaagggtttctgctttggataactgggcccaggccacaaaaaatgagaaggggaatgggaggggtaaccctagacgatacggagaaagcaataatctggctgtggtgctcttgcccagggagaatggctggagaccttaatgataattgttaaagctacgtggagaacttggc

SEQ ID NO: 2198 - DNA, 2300 bp, Homo sapiens
  misc_feature (1)..(2300): DMR15:91503601
aaaagctagcagaaggcaagaaataactaaaatcagagcagaactgaaggaaatagagacacaaaaaacccttcaaaaattaatgaatccaggagctggttttttgaaaggatcaacaaaattgatagactgctagcaagactaataaagaaaaaaagagagaagaatcaaatagacacaataaaaaatgataaaggggatatcaccaccgatcccacagaaatacaaactaccatcagagaatactacaaacacctctacgcaaataaactagaaaatctagaagaaatggataaattcctcgacacatacactctcccgagactaaaccaggaagaagttgaatctcagaatagaccaataacaggatctgaaattgtggcaataatcaatagcttaccaaccaaaaagagtccaggaccagatggattcacagccgaattctaccagaggtacaaggaggaactggtaccattccttctgaaactattccaatcaatagaaaaagagggaatcctccctaactcattttatgaggccagcatcattctgataccaaagccaggcagagacacaacaaaaaaaagagaattttagaccaatatccttgatgaatattgacgcaaaaatcctcaataaagtactggcaaaccgaatccagcagcacatcaaaaagcttatccaccatgatcgagtgggcttcatccctgggttgcaagcctggttcaatatacgcaaatcaataaatgtaatccagcatataaacagaaccaaagacaaaaaccacatgattatctcaatagatgcagaaaaggcctttgacaaaattcaacaacccttcatgctaaaaactctcaataaattaggtattgatgggacgtatttcaaaattataagagctatctatgacaaacccacagccaatatcatactgaatgggcaaaaactggaagcattccctttgaaaactggcacaagacagggatgccctctcatcactcctatacaacatagtgttggaagttctggccagggcaactaggcaggagaaggaaataaagggtattcagttaggaaaagaggaagtcaaattgtccctgtttgcagacgacatgattgtatatctagaaaaccccatcgtctcagcccaaaatctccttaagctgataagcaacttcagcaaagtctcaggatacaaaatcaatgtacaaaaatcacaagcattcttatacaccaacaacagacaaacagagagccaaatcatgagtgaactcccattcacaattgcttcaaagagaataaaatacctaggaatccaacttacaagggatgtgaaggacctcttcaaggagaactacaaaccactgctcaaggaaataaaagaggatacaaacaaatggaagaacattccatgttcatgggtaggaagaatcaatatcgtgaaaatggccatactgcccaaggtaatttacagattcaatgccatccccatcaagctaccaatgcctttcttcacagaattggaaaaaactactttaaagttcacatgaaaccaaaaaagagcccgcatcgccaagtcaatcctaagccaaaagaacaaagctggagacatcacactacttgacttcaaactatactacaaggctacagtaaccaaaacagcatggtactggtaccaaaacacagatatagatcagtggaacaggacagagccctcagaaataatgctgcatatctacaactatctgatctttgacaaacctgagaaaaacaaacaatggggaaaggattccctatttaataaatggtgctgggaaaactggctagccatatgtagaaagctgaaactggatcccatccttacaccttacacaaaaatcaattcaagatggattaaagacttaaacgttagacctaaaaccataaaaaccctagaagaaaacctaggcaataccattcaggacataggcatgggcaagggcttcatgtctaaaacaccaaaagcaatggcaacaaaagacaacattgacaaatgggatctaattaaactaaagagcttctgcacagcaaaagaaactaccatcagagtgaacaggcaacctacaaaatgggagaaaattttcgcaacctactcatctgacaaagggttaatatccagaatctacaatgaactcaaacaaatttacaagaaaaaaacaaacaaccccgtcaaaaagtgggtgaaggacatgaacagacacttctcaaaagaagacatttatgcagccaaaaaacacatgaaaaaatgctcaccatcactg

SEQ ID NO: 2199 - DNA, 1000 bp, Homo sapiens
  misc_feature (1)..(1000): DMR15:92862501
tcactgcaagctccgcctcccgggttcacgccattcttctgcctcagcctcccgagtagctgggactacaggcaccccccatcacgcccggctaattttttgtatttttagtagagacagggtttcaccatgttagccaggatggtctcgatctcctgacctcatgatccaaccgtcttgccctcccaaagtgctgattttacaggcaaccactgctcccgggcagttggagagttttttaaacacactctctcagcaattaatcaacaaagacgtagatgacctgaatatcattttcaacctccttgacctaatatttatttgtagaacactgtatctaacaactctataatatacgtcattttcaagtacacgtgggtacattcaccaagttagatatatgcgggccacaaaacagtgtcaataactgaaattattgaaataatatagaatgcattctgtgaccgtatggaattaaattagatattagtaacaataatatatcttggaaaactgcaaatgtttggaaattaaatgacatatttctaactaattcataggtcagagaaggaaccaaaagtgtggttaaaaatatttcaaactgaataataataaatacagcatataaaaaatatagggctgggtgtgatggctcatatttataatcgcagaactttaggtggccaagatgggagtatcacttgagtccaggagtttgagaccagcctgggcaacatattgagaccctgtctctacaaaaaaaaaaaaaaaaaaaaaaaaaattataggatgcattcaaagtagtactcacagggaaatttatagctttaagtgattacattaaaaaagaagaaaggcctaaagccaggcacggtggctcacgtctataatcccagtactttgggaggccaaggtgggcagatcacttgaggtcaggagtttgagaccagtcttgccaacatggcaaaactccatctctgctaaaaattaaaaaattagc

SEQ ID NO: 2200 - DNA, 200 bp, Homo sapiens
  misc_feature (1)..(200): DMR15:93229701
ttctcaaggatatcttcacttaatataaaattacgagttgacagttcttctttttcagtatgctataaatgttgttccacttccttctggctcccatggttttgggacaataatcctcaatgttatattgtgtttcctatatatgtaacttgctgcttcctttgtctttgctttacagcagactaatgatgatgtatctt

SEQ ID NO: 2201 - DNA, 1300 bp, Homo sapiens
  misc_feature (1)..(1300): DMR15:93344901
aaaaaaaagactgatcaactgcctttgttctcgcttctgtaagtatgcttcctgcatcaccactgactgcttaaaaggtggctgctttctttgtccggggctcagactttcctggatgctagtcctactaagccaggtgatcaccttttaataaagacctttcctgaactcactctcttcagtctctcctatctctgattatcccgccacagtacaccatggcatactatacagtcacaaaaaagaatgagatcatgtcctttgcaggaatatggatggagctagaggccattatccttagcaaactaacacaggaaaagaaaacctaatactgcattttctcacttataagtgggagctaaatgatgagaacacatggacacagagaggaacacacactagggcctatcagaggatggagggtggggagagggaaagagagagagagagagaaaaaaaaaggaagccagtagggtttatagcagagaggagaatttgctttatcagaccttgtcgactgttgacattttgggccaggtaattctttgtgatgggtctgtctggtgcattgtaagatgttcagcagcatccctgccctctttccaatatatgctagtagcacgccccccaacctcagtcatgacaatcaaaaatgtctctagacaggcagggcacggtggctcacgcctgtaatcccagcactttgggaggccaaggcgggcagatcacaaggtcaggagatcgagaccatcctggctaacacggtgaaaccccgtctctactaaaaatacaaaaaaaattagccaggtgtggtggcgggcgcctgtagtcccagctactcggaaggctgaggcaggagaatggtgtgaacccgagaggcagagcttgcagtgagccgagattgcgccactgcactccagcctgggcgacagagcgagactctctctctcaaaaaaaaaaaaaaaaaaaaacaatctccagacattgacaaatgtcttctgcagggccaagctgttctaaagcagtgctgtagtaataaaacatcagccacatctgtaattaaaatttttttgtagccacataaaattaaaaaaggtgaaattcaagcaatttcttttatttaatatttaaaatgataatttcagctacaattattgaggtattttacattcacttttgcgtacaaagtctctgaaatctagtcagtattgcatacttcaagcatatctgaactctcactagccgtgtttcaagtgttcaatagccacatgtggttaaagcaaccacattagacagaaaa

SEQ ID NO: 2202 - DNA, 600 bp, Homo sapiens
  misc_feature (1)..(600): DMR15:94184201
agtagtgctgagaggtaaatttgcagctctaaatgcagcagcctcccaccttttttgcattaaggactgagttcgtggaagacaatttttccctggactgagggtaggggatggtttggggatgattcaaaattcaagagcgttccatttattgtgcactttatttctattattattacattgtaatatataatgaaataattgttatgtaaccataacagaaccagtgggagtcctgagcttgtcttcctgcaactagatgatctcctctgggtatgatcgaagacagtgacatctgaagtgttttgcttatgtccagtctactcagtaatcttgttttggttgctgtcactacagaaaaccctgcttcacaaagacaggatgctggaaatggaagcaggcttttcagtgcttttgtggcaatctctggatatttcactttgactttaatccagaacgtatggagatttgtagtctcaagcatacttttaaggctatcgtcatttgcagtgtcaaacagttgatcctcttctagcatggacaccatcagttcgcctggcttattcacagatgggtcacggatccattccttcccagttt

SEQ ID NO: 2203 - DNA, 1600 bp, Homo sapiens
  misc_feature (1)..(1600): DMR15:94238301
cctcttgttattttctgttataaaaacacacattttaaattaatgtatatcgtatgaatcataaatgaatcatatcattttgtatattgtgtagattggccagtgctgctttggagtagctgttagaatattaatttttatatagaatagataggttttcttaggtgctccaagtagaaggcttttttaaaactgctaaaaagtagctaggagaaaaaaaaaagttcttttatccaaaaactattcactgagcatgtgctatacatgttatgtgctgaaattttagttgtgaataaaacaaatagatcctcatcctctcagagcttacagttgagaggggaaaccagacagtttcacaagtgattacaatgaagcgtgctgttcgttaagggtgagggacagggtgctatgagagcaggtggtgagggccacatccaaagtgccacctaggcctggcaggaaggagatggagaagcacagagggagtgttttgagaaatcagtggatggatgcttttgaggaactgaaagcctaggctagtctgtttaagctttgttaatgacaagttattaataagtgggaatattcatgagaggtctgctaactgatggggaaaactaaaaaggaagcattaaacctatctgtgtgaccacgcccatgttctgtgaagggttttgaagaatccaagatacaatggagttgaccgtgaaaaaaaaaaaaaaagaaaagaaaaactaaaaacaaaaacacccaaattaaaaacaaaaataccaaaatcaaaaacaaaaatgattgggtaatgcttactttttttaaggtggtggttggggaactacttttagcattatgaagcatgtttggatttagcctgagaacttgggtaatatatcaaaaaataacattatatttcttggactacaataaccattattgctatgataatcttgcttaacgtaaaagatatgtatatagatatgcttagcttcttcggtttatagtctggaaatgacctttgggatcagctgttccacctccagttgccccttcatgaataatctggggctcaggagtgctgcaggctcaattattattttcactgggtcaattggtgacaacatctgttgggtagaatctgtcctgagttccttgtcctacagcgacaatgcttcacttgaagacttcttgtttgttgttggaacaggcccagtaaataattatctccatctcctttaagtctttacttacatgagctccctcccctgtcttccttatctcctactttttctgacactgtgctatgttttgaattctgtaggaatccttggcggaagttgccttcagcattttaggcctgtctaaacaggtagaatttatctgacatttctttcactcccttaagcctcatgtgagttggcacagagacatgtagctttggcaaagaatgagaaagaaggttctggggaagttttctctgttaatatttgaaccaaaagacacggtggggcttggaaagtatctgatgaattgtttttaaatgtcatgaactatttatgtgcccccaaattatgtttgatcagataggtgtggccctgatcagtaa

SEQ ID NO: 2204 - DNA, 100 bp, Homo sapiens
  misc_feature (1)..(100): DMR15:96176501
aaaggtttagtggtaacagtatcaaggcctgcaactcatttgaaatgcatcagaaaatcaagacggttggatgattgggtggagggagggacagatggca

SEQ ID NO: 2205 - DNA, 300 bp, Homo sapiens
  misc_feature (1)..(300): DMR15:97319501
ataattcactcagtagataatacaatgttggcataccttaccttagtagatgagtaactgttggttgtgtacgagaggcattttgctaggtgctctctggcagaagtcgtatgggagggatgagacagatgaaaaaggtgggatgaggaggcgtgtgactagggctgtctttctgaaagtccagccatggtaaaatcaaaaagtaggcatgcaggcctgagctcctgttgcctgaatcagaacccagattcagcattgttcctacattatttaccttcccctttgctgaccttttgtcgc

SEQ ID NO: 2206 - DNA, 200 bp, Homo sapiens
  misc_feature (1)..(200): DMR15:97896201
agttatgatgtttaaatacactccaataaacttaaatttttccctatgctattgttcttgaaattcaagctcttctacgtcagtaccatcacgaatactgaaaaaacaccacggaaaagaaagaactttgaaacacgttagacatgccagaatcttaaagagcaagtcaatcattgattaataatctacctatctcctta

SEQ ID NO: 2207 - DNA, 300 bp, Homo sapiens
  misc_feature (1)..(300): DMR15:98993201
tacccacctgacaaagggctaatatccagaatctacaaggaacttaaatttacaagaaaaaaacaaccccatcaaaaagtgggtgaaggatatgaacagacacttctcaaaagacgacatttatgtggccaagaaacatataaaaaagctcatcatcactggtcattagagaaatgcacatcaaaaccacaatgagatatcatctcatgccagttagaatggtgatcattaaaaagtcaggaaacaacagatgctggagaggatttggagaaataggaatacttttacactgttggtggg

SEQ ID NO: 2208 - DNA, 1400 bp, Homo sapiens
  misc_feature (1)..(1400): DMR15:99410901
ttttgccaccatgaaggaagccagactgaggatgaagctgacacagttaattcggggagacagagaatcactgagaaatggggccacagcccctggatggagccagtcgtgaagcccaccctgagcctcggcatggaatttatgtgagaacaaacttccctgtggtttggcatcttagtgtaggtggttttctttgagcttaggtgagaaagggctgagggtctcttcaaggaaacctccctgcagactccctttctggcaaacacacctactctgagactagtccagtgtacctcgaggatcagtattgcacattgatgtcacagggtgagttgcctggattaacaggcatgtcaaaggcacctgcagccttggctctgcctgtcctggatctctttccaagtgaccccccaaagaccctaagtcgaaggagtacaggcaatgggctttgagaccagagaagaagacagcaaaaccacaggcatacctccaaggccaggatgccactctctggtgagatcagctccctcattacaaagagagagcctggattcaccgctccacaatcccaatggctgtgcttctccttagagaggccggagggctcagaggttcagagcactggggtacccagctctgctgcttgttttctgaccgaaggcgtctgtgcttcagtttcctcatctgtaaaatgggagtagtttcgccgtcctagcgttgctgttaggatcagatgagctaattattcataagaaacttaggacaatgctaaacaaaagcaagcacacagtctaacagcagttattagtagtagtataattctcattagcaatcattagtagcagtattctcattagcgattagtattagcattattattttcattcttggtaggagagtcagttgagttagtttctggctttctttttttctttttctttttttgagacagagtctcactctgtcgccaggctagagtgcagtggcgtgatctcggctcactgcaacctctgcttcccgggttcaagcgattcttctgcctcagcctcccaagtagctgggactacaggtgcccgccaccacgcccagctaatttttgtatttttaatagagacggggtttcactatgttggccaggatggtatcgatctcttgaccttgtgatccacccgcctcggcctcccaaagtgctgggataacaggtgtgagccactgcgcccggcccttttttttcttataattttttttttcttttttttcctggggaatggagtctgaagctcttagtcagtgccctccagcagcactgggaggtagatggattctagaactcctaaacatatcaagattcccacacccgcacgctgggcggatcccaagggcagggcaggctgaggtct

SEQ ID NO: 2209 - DNA, 1100 bp, Homo sapiens
  misc_feature (1)..(1100): DMR15:100178501
tcaaagctagaatatgacttaaaaagtttacgaagttaagaatactctataatatgtagttgtacttttacccattctgttgttcttttactattgttctgttgttcttttacccattctgttgttttttactattgttctgttgttcttttacccattctgttttgaaggatccatattcttctcctaccattttctttggagagcttatttcagccattctttaagggtccgtttactagcaacaaattctattagatttcctttttctgagaatgtattttttcttcattcctgaaggatagttttatttgatataggattgaaaattgagaattatttcaacacttaaaaaaaattttgtgccacttcattctggcctctatgatttcagatgagaaacctatcgtcatccaaattgctgttcctttagaggcaatacattgttcccaatttttttttcctaatttctgtgggtacatagtagctgtatgtatttatggggtgcatgagatattttgatacagacatacaatgtctaataattatatcagggcaaacggggtatcatcatctccaacaatccaagtatacttttttagttatttaaaaatgtacatttaaattataactatagccctgttgtggaaccaaatactaggtcttattcattccttctaactagtttttgtacccattaactatcttcacttccctgccagcctcctattacccgtcttagcctctggtaaccatcattctactctctatgagttcaattgttttaatttttagctccaacaaataagtagaacatgtgaagttcgtatttctgtgcctggcttattatgacctccagttccatccacgttgttgcaagtgacaggatctcattctttctactccattgtggtaagtaccatatttttttaatccattcctctgttgatgaacactttggttgcttccaaatcttggctattgtgactagtgctacaataaacatgcgagtgcagatatctctttgatatactgacttcctttcttttgggtatatacctagcagagagattgctggatcacaaaaatagttctatttt

SEQ ID NO: 2210 - DNA, 300 bp, Homo sapiens
  misc_feature (1)..(300): DMR15:100379801
attgcactccagcctgggaaacaagagcgaaactccatctcaaaaaaaaacattgccaacacaccaaaagccccaaacagtatctgctatcattgctatcattacttaaacactgtggtataatttttccaattattgaattttgattttttagtatattcacaagattttgcagccgtcactataatttagagtatttttgtcctctgtcaaagaacccccccatacccattcgctgccacttcatactccccacattctgtccccaccctaaagacctactttttgtctccatagatt

SEQ ID NO: 2211 - DNA, 2200 bp, Homo sapiens
  misc_feature (1)..(2200): DMR15:101772001
accaggctcatcagcaagcttcagggcagtggccgggaaatttgctgtgtccctcgttgtagtcaccacaagccacaacatcgtctccagcagctccagcagcttcacctggaagggaggggtgctcagctgttatgcatctaccggcgcccaccctcacgcccacccccacccctgcagagatgttgcacaccctaccttcatctcttccttgtcctggaccagcctgatgatgtcctcctccagttgccgcatctttggtactgccccctggctctgttcaaaggtgatgaactttcctgtgggaggacaggactctgacgctgaggcccctccaacagccctgcagctcccgctgccgtgccctggcctcccgctcactgatggcttctgtctttccagtactggatgaatcaaagttctagcttctccactcgctccctcaggtccgccttctcctccaggaggtccataaggccactctggagccaaaataatgggttcacatctcggcagtgacctgccccacccctgcccttcttggtccatgccaggactcactcacctccagcttctccatgacctcctgcatagcctggtgggtctccccactcacagagtcacccccagtcactggggctgggaccgctgcctctggcttcttctggactgaggccaccaggtgagccatgcgctggcagcacaccctctgctctttcacctgctctcgtaaccgtgcctgctcctcctgggcattggctccagcggagttgaaaaatgcaacctgagggcaagaggtgagcattattgtagaggcatacacagaacaaacagggcagagaggtggagtgcagccccttcccttggggtctcagagagtgcatctgttggtcacaggtgaaatggtgtctgaccactggctcccggaaagggtgagtgtccagagaaatcagaaggcagggaaaccaagagcataaaggggtcttggagggaccacagagggaggtggcaaaatgggtacagggggagtcaggctcaccgtggcctcccagctctccaggtgctccgggttgctcggcatgggccgaggtgcctcctcctcctcactgtccagatgtcctcctccatctcctgtggggggtggccagaagggtcctcagacaacccaacaaggggggtactgtgggcccaccgctgcctccaccctcactgtgtaaccctgagccagccactacccagagagaaatgagctgctgttctttatttttacttttaagaaccaagatcaggcataatcccactacggtcagtgcgggagttctgacctgctccctttctgacctgggccagttcagccatccttaggcaacttggtggccccctgctcccaggaggtcaccatattgatgctgaacttagtgcgggcacccggtcggcataaggaccagctgttctaaaggtctcttccatctcctcaatcctatgctgctaacagtccccacttcctcctggagctctctcctcttcctctgggcagtctcccttaccttccccagggagagccatgaggctcaactgggcctgtaggggctggttttgctggctggcagcttccaggcactcctaaggggccaggaaagggtgagaaggcacagagtttgccaggttgtcccccttagggccccagcctcagcagctccctcccctgggtctcctgcaacttttggcgggccaggtcggctatcgctttgcctcgagcttcctgctgatgcagctggttcattagctgggtctgctgcagtaactggctgtgcagtgcctcctcagaggtcagctgctgataggcggccacctgctcctgacaggtggccacatactgctgcaggtgacccaggtaataatctgggtgctgctgcagactctgagcctctcggctcttcagctccacctgcaggaagaccctgggtgtgagggcttgtggttgctggcttccagattctgggcccattaatagggtagtgagggcattgtggggctctgtcgcctgcccaggcccctggccccttgctccaggcctaagtgactgcctccttttcctagaaccccatgcctccttccccagcctcaaatctcatatcctcttctcaccatttaaactgtaggccacagactggtggaaaagcactgggagccaaccacc

SEQ ID NO: 2212 - DNA, 700 bp, Homo sapiens
  misc_feature (1)..(700): DMR16:411901
ccgctgcttcctgccgcctcactcagccaggtggagagcaccaatctgaaccagcaatgcctgcagcccagcccctcctctgaacactcagctattactgcgctttccctccccacggccccaactccagggcaggagcaactggacagtgggcctggcccgtggagctgccacgcaggtgcctgagggccaggtgccacgcaggtgtctgaggaccaggtgccacgcaggtggtgggggtacagacaagatgctgggatgtcccctgccccatggtcaagggtgtcctgcctgcctgggtccagggcctgagggagccacatggatcccgagacttgtgttctcttggctgaaaacactgaggtgctcccatctgtgcgtggcccatgagctgggatggtcctccagctgcccacaaggtccgcccctctgtctctgcaccacctgtttgcataaacacactttgctacaatcttgctagtgcgttttcttaaaagataatctatttactgtaaaaataaattggactttgcaaaagcttttagaaggaaaagaaagaggattaaagagaattgctggtgatcctatcgtttaggggttgtgtttcctttctgtcttttctgtgatgtttacttattattagtagtagttttgttttctttcttttttttttttttttgagacggcgtctcgctctgtc

SEQ ID NO: 2213 - DNA, 500 bp, Homo sapiens
  misc_feature (1)..(500): DMR16:471301
atggccagtgctacggtggtgtcgcttctgcccaagatgaggagcccctggcctgcccggacgagttcgatgacttcgtcacctatgaggcaagtggttttcacccaggagcttgggggaagtctggcatccacctcttcctttatgccctacagctcgtgcctcctgcctccgggctgtcttccgtagaagctggcgtgaaggaagggcctcccgccctgtgtgcaccgtggggctctgtggctgtgacgggaggcccacagttgtctgtcccacacgccctgtcagcctgggcaggaatcctcccccagggcctgtcgccagcagaagtggggtgggcagtgatgtcatgaccacccgctgccaggctggcaggcacaggcggagcagagggcttgggaggattccttttgtcaacttgcaaatgattttctgtgtttggggatgcctgactaatgcctgcccctgcttggctgtcctccaccctgctcccagatgca

SEQ ID NO: 2214 - DNA, 300 bp, Homo sapiens
  misc_feature (1)..(300): DMR16:545701
acagggccaaagggagggtgtgtcccaggaggcccagcccacctctgcctgcacctgcggtcagcggggtgcagagtctgtgaaggcacctcccggagtgggggctgcaaagatcatggccactgtgccacccacaggggcccaggccggacgcctgggctgtgccgcctcggcagccaggccgaggaacgtgcaggtgcggccgggagcccgccggccacagctgcatccatgcccttctccgagtggtgatggcggggagaggcctggctgtctacgggcagattgcttgggctttca

SEQ ID NO: 2215 - DNA, 7300 bp, Homo sapiens
  misc_feature (1)..(7300): DMR16:627101
gccccgcagcagcaccgcccagcgtgcctggctttagggagcaaggcaggggatggggtgccagtggacacatctgtgctgggcagagaagtttgggcgtccaggtcctccaggagcccagcctgggaacacctctaggagtgtggagaccccgccaggcttctcttgggcacctcaggtctccctgcacagggcctcctcccccacagccccatggtctgacaccccctctgccccacagtgttcagcctgcaggacctctgctgccgggccatcgtctcctgcacccccgtgcacctcatcgacaagcttccactgcccgtcaccatcaagagccacctcaagtccttctcgatggccaacggcatgaacgcggtcatgatgcacggccgttcctactccctggccagcggggccgggggcggcggcagcaagggcaacagcctcaagaggtccaagtccatccgtccaccccagagccccccccagaactgctcgcggagtaactgcaagatctcctagcggggatgggcggggccgcctgtgcagatgccaggagggctcgagctggacactcctggctggacgccaggccagtgccgcctacgtggagactgtccacacagctgcctcagaagcgccgggctttcctcacacctgagccgggtgcgaggaggagcatgcacggaccaagcgcggcaggcgggaggagggggcgcggctgggctgctggtgcttccgggaatcttggtcggaaacaagccgggcctccccagctgcctgggcttgaccggcggggagcctggttggcctttcttatttatatagagaacacttcacttttttgtacatttttaaggggccttcagggaagcctgggtgtggcccggtggtggtgcactggtgacttcatggccacgccagctgcggggacgcacttgggactcctcgagaggggactcgcggccgcgatggcaaggcatcctgtgaattcatgcgctgcgagtggcggggctgcccagaggccgggggagcagacagggccggtgctccctctggaagcttgggtgaccggggccctggctcccacgggatggagggtgtggtcctgtggtcagagcccaagcagcactcaggagaggggagaaaggaggtgcacctggcagcccacatttttgttgctccccaaatccctccccacgtggggatgagaaccttcctgctgtgatgtgacaccttcggggacattgaccactcaaaactcagatcatctcgcccaccctggagagtgcagagctatctgtagacttaggaatacttgatgggcagcggtgcagaccccgggcacctgcgtgcagcctcctgttctcggcagcttctgtcgctggccctggggtccccacagctgcagctctcctgtgaggttgcacggcatcagaaccatcctgaccttcttagggacgtgcctggaaccacctcgtccacgtccacgtccacctgggggcctcgggaggctaggcccctcctcaaaggcccaccagcccggcgctcatgctgagccccaggcacgcagggccggccacctctctcctgaagccattggccgctcctccacccagtgcttctgcccatgcctgccccagcagcccctctgcacggtcaccatcgcctgggcctgcccacagcactggtgctcacctctacctcctgtcctcaggccgtgcggcacgacatggccagcacgcagaaggagccctcccgggacccaggaccccccgtggtggactccgcggcacatgcttcccaaggtggtcccacggagggtgttactgggcaccagtggactcgccccatggcccgttcctgggagatgagggccgtggcctgcatgaactaccagatgagtaagggaaccccaggcaggcggccctgccacagcccccaaagacactggcctcctgctccagcttccctgtcctggccccacctgtcctgttgctgccagcagggcccttgtttgggattatgaacaaacctcacagactttgaggacctggatggtcctgcattcacggcatcaacactacccgcgctgctgttagacactccgccattcctggttctctccgaaccgttctttgtacagtaaatgtaattcagctgtggtccccacgttttgctgtgtctggtggggtgggtctggcagtggcggtgccccgtgccaggggccagtgctgcttcatacccggcaaactgacctctggcctttgttttgcctgctgttccctgcgctgaccgggctgacctgccgcggttggctgggttcgcctcaaagtgagggctggagctgggctggagcagctgggcctggtcacggccattctcctcttcccggtggatggaatcccagctgggctgtgctgagccctcgctcacagtccccggcagcagatggcctggggcggactgtccccaacagcagcaggactccagagggccaggtcctccagtcagtcggcccgctcagcagagccgcctgcacgctggccaatctggtgtctgctatgcccggcccaggggggtgtggacgccccggaggtcacagctgagctggaacggggcactccagttggtacagggaccagaccacagcctctggctcaggtgcctccctgtgctgtttcgtgggcatgtccgggccttaagcccctccctggcagctccagcccagccgcctgctgctgggtctggcctagctacccccacccccacgctatcagggcccacccccagtctccttgtagagcagggactggcgcctggagccgtctccgggtctcattctgaccagaccaggctcctgttaccctgcctcctgggtcagaggtcagacacagggtcagggggacactcccatccggtctcaagagaaccactccctgaggccccagacatctggagccacagagggtttggaagggtagattccaggcagccttttgtcctgctgcaccaggcaggccagccccctgccctccccaacgaagaggagccagcctggggatgtgtgccccgccgacggggggctggggcagggcaaggctctggtgccctgggacacttgctcttttcagctgcagacgcccttgcacttggccttccctcgggcggtgccatcccacgcggagccacgtccagggctacacggtgcgtgggccgaggctccggcatcagcgtttcgggctgttcttatgcttgtggtggccacaggcctcttcctgctgcacctgccccgccttggggacaggcctgagccccaagcccgctgcctggtttcagggatggggtctctgggaatgcagtcctgccgggttgggccccactccaacaggggcagcagagcagaggaggccgggctgtgctgggcgtcctgcagacccctgtgcccctgaaacagccatggaggggggaaggaacctcggagcggagtgaagccctcggccgcacgtgaccgttgccagcctggacctggcccgggggacccaggctgtggtcagccacgctctgcggggagggcccgtgcctgccacccccatggcataggagcctggggtccagagggcgccagggacaaaagctgggatctgctggccctgcccccaccctactgagggtcgtcaaggagattgatctcagcccaggggtggacgaaggggttcaggttacagggtcccctcccctccccctctccagccagagccagcccttccccgccccggtgaccctcatggccagtggctctgtgctcatgggcctctggcccctccccaacctcctcccctctgccctgtgctgaccagggcctgggagcccccgcacggttcagacagaggggccaggctgaagctggagaggaaccagcgtcacacagacggcctctgagaacttggagaccccgttacccacccagcaggggtgtcaggacaagcatctgctgcaggcttcagcctcaggggcaaaagggagccccggggtcctggtgggggcaccgaccacaggcccggagggtggatgcctgcaggaagctgggctctgtggagcccgaggaggggctggtggccacaccccccggccccctggctcggcggccctcatgcccgccctacgtccactcctgccgctcctgctcctcctccggctgacctcgggggctggcttgctgccagggctggggagccacccgggcgtgtgccccaaccagctcagccccaacctgtgggtggacgcccagagcacctgtgagcgcgagtgtagcagggaccaggtgagtgtggtcgggccggggtcctggggctcagagcagccagcctgggcaagaccctgctggaggtgccaccttctgcctgggctccccagacttctggggggtctgggtctgggccccttaaggggcccagagacacccccatcgttgccctcatttgtcttaagaataagagccctccccactccagctttcatgctccccatgtgcctccaccctggggcaccatcatcctcggcgaccacccccaccccgtcactgcctctcctcccaccctctcctcccaccctctcctcccatccacttctcccaccccttcactgcctctccttccatcctctcctcccaccctctcctcccatccactcctcccatccacttcttccatcctcttctcccaccccgtcactgcctctccttccatcctctcctatccactcctcccatccacttcttccatcctcttctcccaccccatcactgcctctccttccatcctctcctatccactcctcccatccactttttccatcctcttctctcaccccgtcattgcctctccttccatcctctcctcccatccacttctcccaccccttcactgcctctcctcccaccctctcctcccatccactcctcccatccactcctcccatccacttcttccatcctcttctcccaccccgtcactgcctctccttccatcctctcctcccaccctctccttccatcctctcctcccaccctctccttccatccactgtcctccctgtcctcccaccctccttccatccgggaccagtgcagatggtggtgggggtgctgcagccgatgtccagcctttgtcctggcccgcaccacctgctgggtggtcctgagcactgtacgccctccttgggcctcagtttcctcgtctgtacaacgtaaagaataacggaacttgcttgtgggtgtgaggattctggaaggtaagccaggtggcacctctggcgaggtggctcctcacacaggatggaaaggacactgagtccccggggaggcagccacagagcggggggctccctgctaccccacctgggcctccccttgcaggggccaggccagagccccggggcggggggcattggggctcccacctaagtgtcccccatccccaggactgtgcggctgctgagaagtgctgcatcaacgtgtgtggactgcacagctgcgtggcagcacgcttccccggcagcccagctgcgccgacgacagcggcctcctgcgagggctttgtgtgcccacagcagggctcggactgcgacatctgggacgggcagcccgtgtgccgctgccgcgaccgctgtgagaaggagcccagcttcacctgcgcctcggacggcctcacctactacaaccgctgctatatggacgccgaggcctgcctgcggggcctgcacctccacatcgtgccctgcaagcacgtgctcagctggccgcccagcagcccggggccgccggagaccactgcccgccccacacctggggccgcgcccgtgcctcctgccctgtacagcagcccctccccacaggcggtgcaggttgggggtacggccagcctccactgcgacgtcagcggccgcccgccgcctgctgtgacctgggagaagcagagtcaccagcgagagaacctgatcatgcgccctgatcagatgtatggcaacgtggtggtcaccagcatcgggcagctggtgctctacaacgcgcggcccgaagacgccggcctgtacacctgcaccgcgcgcaacgctgctgggctgctgcgggctgacttcccactctctgtggtccagcgagagccggccagggacgcagcccccagcatcccagccccggccgagtgcctgccggatgtgcaggcctgcacgggccccacttccccacaccttgtcctctggcactacgacccgcagcggggcggctgcatgaccttcccggcccgtggctgtgatggggcggcccgcggctttgagacctacgaggcatgccagcaggcctgtgcccgcggccccggcgacgcctgcgtgctgcctgccgtgcagggcccctgccggggctgggagccgcgctgggcctacagcccgctgctgcagcagtgccatcccttcgtgtacggtggctgcgagggcaacggcaacaacttccacagccgcgagagctgcgaggatgcctgccccgtgccgcgcacaccgccctgccgcgcctgccgcctccggagcaagctggcgctgagcctgtgccgcagcgacttcgccatcgtggggcggctcacggaggtgctggaggagcccgaggccgccggcggcatcgcccgcgtggcgctcgaggacgtgctcaaggatgacaagatgggcctcaagttcttgggcaccaagtacctggaggtgacgctgagtggcatggactgggcctgcccctgccccaacatgacggcgggcgacgggccgctggtcatcatgggtgaggtgcgcgatggcgtggccgtgctggacgccggcagctacgtccgcgccgccagcgagaagcgcgtcaagaagatcttggagctgctggagaagcaggcctgcgagctgctcaaccgcttccaggactagcccccgcaggggcctgcgccaccccgtcctggtgaataaacgcactccctgtgcctcagacctcctggcttgctgctgctggtcgggcgaccctcatccttccaggtgccccatgcccagccagtttccgctggggccttgacacccactggggcttgggctttggtacaaggtcaccagggagtgcctgtccgcccctgcatccccaaccagctccatcctgcctcagcagctgtctcggccccaatcccactgcccgagctccagcagcaaggatcaggacgtcccaagcccttgaccccacaggagaccccgtctcccacccaacctcacaaggtgctcc

SEQ ID NO: 2216 - DNA, 6100 bp, Homo sapiens
  misc_feature (1)..(6100): DMR16:761001
tttagaggcccacgtgtgggcattggcccgcgatctgaaaggggctgtcctgttcctcatgggcgctgccagcgccacgcactcctctttctgcctggccggccactcccgtctgctgtgacgcgcggacagagagctaccggtggacccacggtgcctccctccctgggatctgtaagtaacaacctttgagctcttcctgttgtggtgtggatggaatctgcaccttccatctggagaactggggccgccccaggccgggcttccagcaccagagcgatggtcaggcttcagctggacgcagatttcaccccgcagggcacacgcagacccatttgtttggaagcggcagtcctaaggcagtgcaggtgcctccacggccccagcccagctctcctgcaggtgtaaaggatgcagattccagggccccccatggcctgcagaggcccctcagagcaggaagggccgggctctcggggagcccccatcccaggtgctgaggtccttgggtcacatggagctggggtggggagtgcccaggtcccctgtgatccgatggccacgtttccctcctggcttcacgcaccccaagggctgggggtcccactcactgcccattttctggctgtggggggggtctgttttcttccaccttctcaaggtgttcagagcctcaggggcctccccacttcctctggggcctgggggagtagagtctgtcacccggaggctgtgtgcctccccgcgacattccccagtggccgggccgaccaggcaggctctgcctgtggatggggctgctgagcatgagcgtgtgacccccatttctgagctgtgggtggacccaccgggcctgggccaaggttttcaggaggcagctctattctactccgccatggtggcctccctgaaaggggtgagtgtagaagccagttccctcttctgcgagccccacccctaccccaggaggacaattcttgttcagggagggtctccccacccacttccccaccccacagtggcccacaggccccaccctagagagtacaaggggctccccaggctgctcactggcccagccccgccccacctggactgcacctgaaaatgggctcagagaggccaagtggcccaaaaagacgctgctgggtgggaaggggcggtggcctctgtgcccgcagtgcccctcctgcctcaagggtgttgtctgcctggcagagcctggggtgttcacaaagcccaggcacctgcagctgagggcaggggagagggaagggagccacatccaggcgacggggctgctcgtcctcctgtgcgagagtggggagactcaggccagcccaagtgggcggcggccccggttgcttgatctaagctctgctcacactgccctgcccttctgggagaggggtgggcgccaactgactcctgggctgtctgggctggggaccgggatctcagacccagcccctcccctggacaggaggagccagtccaggggacagagggctcagtggctggagggcagggccagggtgcggacacaagctgcaggtaccacagaagtttgctctgggagcccctcctgggcccatgtggccccaggctggcccaggacagaggcgtggggtgggagcagggggtcccatcctgagtcactgccctccacagacacagaccatggccttgccaacggctcgacccctgttggggtcctgtgggacccccgccctcggcagcctcctgttcctgctcttcagcctcggtgcgtacttgatggggctgctggtgaggtggggacggcccaggggccttgggggccaggcccccagcaaggctttgcctgcccctgccttctccctggagtgcctgtggtggccacgtctcagcagcagtctctgcccccagaggtgactggagctggagatccagccagggagtgatggggctcaggacacagtggggatgtctgtgggatgggtggtctgaccggccaagcagccgggtctcagggaaagatgtggaaggccgggctccctggtggagtcccgacccctgtgcctgggggactgtgatgtcacggggtacatgggcctgagccactggcttctctttggggtgtgcacagggctggctgtgggggcggccaggctctgcctccttcctcccctgggtcagggcacagcccagaggcccgccccctcccccaagctgtcccctctgcccctttaggatgggtgcagccctcgaggaccctggctggagagacagggcaggtaaggtcccctctggggaaacaggggagggtcttcaggtcccaggtgggggtgccatgctgtgttctctctgtcacgtatccacggtgcttgccagtttccacggtccttgcttgcaaaggggcacctggacctgcatgtgactggcctgggagcagccaggtccagggagcggcagagctgaaattgcagctgggtctgggaagtagatggatgagaagcagccaagcccatgggtctgagacacagccaggcctgggaagtagctgaactcggggagtacctggcccaggggtagcgggacctgggaactcctgctccagagagctggtctgagccatgttcagcaggccctgtgtccccaggaggctgcgcccctggacggagtcctggccaacccacctaacatttccaggtgggtctggggtcctcacagtcctcaagggtgaggctcgaggggccctcgggactgagggtgggcagggcaccccatcccccagcatcccctcccccttcctcctctgctccacctcagatctgactgggctcaggactgcgggagggactgacacccctcaggtgatggcaactcccggcccttgagggcgtcacctggtcttggggggaggtctgcagggagcaccagggtcctttggggagaggtggggctgtggggcttggggagcactgggtggacattgcaggggaggggcgatcgtgggtgcccagcccgacccttcctgcagcctctcccctcgccaactccttggcttcccgtgtgcggaggtgtccggcctgagcacggagcgtgtccgggagctggctgtggccttggcacagaagaatgtcaagctctcaacagagcaggtcagtctcagttgggctgaggcaggtgggcacagctggggctgaggaattcacaggcagctctgcagtgcccaccttgccaccacggtcccctctgtccctgctgccatctctccccggccagttcttcccagagttcctctggccacccaagctgaccactggggtgcctgtccacgtcaggggctggctccccaggagcaagtctgatatgacgctgtgtgctgggccccctcctggagcgccgtgggcagccctccaggctctgccccaagggtgaatctttttcgggggagtgggtgagatctggggaaggggagcggagccaggcacgggagcccccatcccccagggcagcgctgcaggcggccagagatccacttccacagattctcgtggccagggcaggggtgtgttgtggtgggcagactggccaggcgaccctggcccaccatgtgagtggcggctcgaaacgctctgtgctggactccctgcccctgcagctgcgctgtctggctcaccggctctctgagccccccgaggacctggacgccctcccattggacctgctgctattcctcaagtaggccctgccccctgaacccacccccccggcttttgccgccagccctcagcccccaaccccctgccccttgcctcggatcccaggccacagcagagatgtggaggccggccgggctgcctctcagggtggggacgggtgtgatcagtgcggcctgtccccagcaccctctcttcacagcccagatgcgttctcggggccccaggcctgcacccgtttcttctcccgcatcacgaaggccaatgtggacctgctcccgaggggggctcccgagcgacagcggctgctgcctgcggctctggcctgctgggtaggggctggggccagcgcggggcggagagggctcggcagttccaaaagcgctgaggccagcctctctgcagggtgtgcgggggtctctgctgagcgaggctgatgtgcgggctctgggaggcctggcttgcgacctgcctgggcgctttgtggccgagtcggccgaagtgctgctaccccggctggtgagctgcccgggacccctggaccaggaccagcaggaggcagccagggcggctctgcagggcgggggacccccctacgggtaagtgaaggtgtctggaacctcgaaggctcacctggcggcgtggtatcagcagcgtgaggacacttgcggccatgcctcaaggcccagggtcagtcacccccgccaccacccctgccaatgcccccagcgtcccctccacagccagggggtacggcctggcctcttccctctctggggctgcacgtggggggtccctgagctgtgtcccgtgtctgcacagccccccgtcgacatggtctgtctccacgatggacgctctgcggggcctgctgcccgtgctgggccagcccatcatccgcagcatcccgcaggtgagaccccaatccccagcccgtggggatgcccggccacccgaggctcagcccaggtcctgctcgtcctcagggcatcgtggccgcgtggcggcaacgctcctctcgggacccatcctggcggcagcctgaacggaccatcctccggccgcggttccggcgggaagtggagagtgagtgccgtgccctgcgcagtctggcaccaggctgggcagcacccctgggggtgggcatcactttagggtctcacctgcccctccctggctctgcagcacatcccattataatcacagagagtggacagaatccctgtttgccagtgggtaaactgaggcacagggagggtcacaaatggcccgaggtctcatctcacaggaggtgtgggaggaagaaggggtcaaacgaactccggccctgacccctgacccctgtgccctgcagagacagcctgtccttcaggcaagaaggcccgcgagatagacgagagcctcatcttctacaagaagtgggagctggaagcctgcgtggatgcggccctgctggccacccagatggaccgcgtgaacgccatccccttcacctacgagcagctggacgtcctaaagcataaactggatgaggtagttcatgactcaagttcccaccggcctgctgtgtccaagccatccccagcccctctgggagtgacatgggccctcctggtctcttggcctgcagctctacccacaaggttaccccgagtctgtgatccagcacctgggctacctcttcctcaagatgagccctgaggacattcgcaagtggaatgtgacgtccctggagaccctgaaggctttgcttgaagtcaacaaagggcacgaaatgagtcctcaggtgaccgtccggctcgggggtcatgtggcatgagattgggaagggctgaggggcagagtgggggacaaagcctgaggttgggcgggcctggggtcaggggcacggcctgaggttatgctggtggtggagggatacatctctccttgccacaaggctcctcggcggcccctcccacaggtggccaccctgatcgaccgctttgtgaagggaaggggccagctagacaaagacaccctagacaccctgaccgccttctaccctgggtacctgtgctccctcagccccgaggagctgagctccgtgccccccagcagcatctggtgagtccccagaactctgcccggcaaggtgggtccgtgtgctggcgctcactgtccacccaccgtgtccccagggcggtcaggccccaggacctggacacgtgtgacccaaggcagctggacgtcctctatcccaaggcccgccttgctttccagaacatgaacgggtccgaatacttcgtgaagatccagtccttcctgggtgagccagggagtccctggccagggtgggcaacacaacgggggaagcacagactccactcgggggtgccaggcctttgcctcgccgg

SEQ ID NO: 2217 - DNA, 1700 bp, Homo sapiens
  misc_feature (1)..(1700): DMR16:1741801
agccggccctggttccctcgtgctacaggatacggtgttgtcctgaacataacagagcaggcggccagtccccagagctgtatgcaccccacaaagagaccccttcccagggtcattcttcatagctccccacccaggtagcggagctcctggtcagcggcggctgctgcgttcccctgtcgccgtctgcatcctccaggcatggccagagcaggttccttgaacccctgaggaagctcccttccctcctacagtctcagggctgagatgtaagcagctgaggctgtggtgcaagcagactcttaattcttgtcctgaatagccctgagcagtgtgggctccagcatctgaccacgtggcctgccccccagacctgaggaggtgaggagccagcctggcctctgggacctctgggctgttgactggaaacctcccgcggaggaggacgtaaagggagaccttgggctccatccctgctcttgcttatggcccacaggaggtcatccctagggactgagcccacagcagggggcactgagcactgtcctgacagctccagctcccaggcgctcccactgtcttgccaggctgtccgaggccaggctgtcccagggtccgtcttcaggttcggggctccctgacagcagagaggacacgtggggagggagaagacgcccctcaggctcaggctccggctgcagcagatgagacggggtcagtccttactctggatgtgtcgtgttcagatattttgcagtgaggcagcctcatgaacaggagtaatgaggatgggcaggaggggccaaggaacaaggcacaggggcaggaaggctggattccctctgctggcgccaggggaacaggcagggctggcagtaacaccacagggaggcagggctgggcacacataagacaatggtcctaaaaggcattgctcatggtggccgtgcagcgctgaccgtgatgccaagtcccgtggctggctctgctgtggggtgtctaaagcacacccggcttgtgtctgtttaaaattgaacttaggccgggcgcggtggctcacgcctgtaatcccagcactgtgggaggccgaggcaggcggatcatcaggtcaggagatcgagaccatcctggctaacacggtgaaaccccgtctctactaaaaatacaaaaaaaaattagccaggcgtgggaggctgaggcaggagaatggcgtgaacctgggaggtggaacttgcagtgagccaagttcgtgccactgcactccagcctgggtgacagagcgagactccgcctcaaaaaaaataaaataaaataaaataaaataaaattgaacttaataaaaatgagaaactgcagcatcatgggaggggaagcgccacgtaggatcataactgagtagctgctcgagctgggctgctggctggcatggagcggccccatcactcgaggtctgcttgccctgggagggcttgggaaatcttcacggccaccctctaaccatcgcttcctctcctctcgccccccatttcagcaggaaggagcgccccacctccctgaacgtgttccccctggctgacggcacggtacgtgcacagatcgggggcaagctcgtgcctgcgggggaccactggcacctgagtgacctcggccagctgcagtccagctccagctaccaggttttgtagccgtgccgtggagtg

SEQ ID NO: 2218 - DNA, 3400 bp, Homo sapiens
  misc_feature (1)..(3400): DMR16:2134201
caggagcaatgtggccccgaggggcacgggctccattggtccaggagaacccattcttctcccaccctcgagaccacccagcaaagccccaaggacacacggctcccctaaggaagggtggccacaggcgggagtgacccagaaacgttacaaaaccaaatgccagaacccacccaatgtttagcaagcctggggatgtgccacgtcccccagggatccagcacgcacccaaggagacactgtcccggcgaggagcctggagcctgggaaatacaaggcatcagactggtcccaagactctccccagcgctggggacaactgtctgcttatcttagtcccctccgcccttttcaatccaaccctgggtcctgggcacctcatagttccaaacccctgctatgcacatcccggctgtgatgcctgggacaggtcgtgtcacctctccaaacctgtttcctcatctgtgaaatgcaaatctccacggtccctatgcctcggatggtcagagtcaggattccgcatgacgacccccaacaggagcctggcacagacctggctctgggcagcgtctccataaaggccacctgttgtttttatctcccgaaagcgaacatgacaaggctttaaccccccacggcaatcccccctcacccctgttctcaggatagccttggaacccaatagcagagcgcctgaggcccttcatgaccccagcccacccgcgagcccacctcccaccctgcccctacccctcacacctcccgtggccagcctccagcctcacggtctttgctcacaccgttcaccccccttcttctggacccacctcatcgccccttcctaagcatcagcccaattcttgcacatccatcaaatccttttccagacacctcctggaactcttccctgccgccccctacagccatccccacctctccgggtaccccgcagccccaggccgcatcccaattcctctccaattagcgactgtttgtcctcccagctgagcgcggcctccgcgccccgcccccgctggcgtctgcagagcccccgggtgggacgtctgtctccagacccggggtttttcggctccccggggccgtgccaaccgcggctccaggcgttccttatttagcagggccgccgtgccgcgccggagcctcgccctgggagcgtcctggcccgcgtcctgcttcccgtcccgggccagggaacgcgcccacgcccgcccgtcccgcggcctctcccgggtgccgctgggcccgctactcacagcgctgtggcgtccgcggggatgcgcagcgcgggaccgagcgtccgcagcccgcggcccgagcagttgacgcggcaggcggcgccgggcgctgggccgcagaggcaggggggctcgcagggcccgcagccgcgcccggggccccccgccagcgccccgagccacaggcccaggcccagggccagcgccaggcgggcgggcgcggcgggcggcatcgttagggcagcgcgcgcatggccccgccgtccccaggcccgcccgcgcgcggaggccgcagctcaggcggggcccgcggacggcatggcgggcgcggggctggatggggctgcggccgcgacctgctgctgagcgacgcccgctcggggctcggggccaggccgctccgggagctcggccgcccgctcggacgctggcgctgcagtgcgggccccgccgcggctcctcctcctcctccccgcgcggcgcggggcggacggggcgagggggggcggggcgggtgcaggctccgcccccttcgccacagcgcgaccgggccagcgatgagggactggcatccggaggcttcaccctccgctccacagggtcggcagcagggcggggcctccggaagctccgccccacgcgttcccggggcgcatgcgacgtggggcggagcgtctggaagctccgcccgtcgcactgcagagtcggccgaggcgcacgagctatttttcacgctccgccccgctgcaggctaaagtgcgtgggcgggaagcggtgggcagggtgccatctggctccgcccttctcctgtggtgtgggccaggcggcgggttcctcctcctgcagcagccacaggctccaccctgatccttcttccgcggtgtggatccttctcccgcaatctccgtgcgcggcccgagtcagtacccgcagcctcccgacgcacccgctggctccaagcctccctaccccaggtttcctggctgagagagagacagagggagagagggggaagagagagaacaggcaatgggaggttgatggtgagagcttattgaaagacaagagggaggaaacccacatccttcattccccatccattcatttattgccttatttattccattgaatcttcacagctctagaaaaagtgtgctacaattattccctttattaaatgaggtcactgaggcacagacagtttaagaaatttgccagcagggcacagtggctcactccggtaatcccagaactttgagagggggaggaaggtggatcccttgagtccaggagttggagaccagcctggccaacatggcgagaccccgtttctacaaaaattagccaaaattagccaaactggctcacgcttgtagtcccaggtactcgagaggctgaggccggaggagcgtgtgagcccagtaggcagtggctgcgctgagccgtgattgtgccactgcactcccgcctgggcaaaagagtaagatcctgtctcgaaaaaaaaaaaaatggaaaaaagaaaaaaagaactggctgggagtggtggctcatgcctgtaatcccagcactttgggaggccgaggcgggcagatcacaagatcagaagttcgagaccagcctagccaacatggtgaaacctcatctctactaaaaatacaaaaatcagctgggcatggtggcaggcacctataatcccagctactagggagcctgaggcaatagaatcgcttgaacctgggaggcagaggttgtgccactgcactccagcctgggcaacagagcaagactccgtctcaaaaaaaaaaaaagaaatttaccaggtcacacagcaggtggatggtaaggctgcgattgtattccaaacccagcttttaattgcagtcaaatgacagacttaagattcaaggactccagtggagggaagaaacagccacaagaaactgctgccaaatgagcaaaacagattaaccaagtctcaatgattgtttgaaggcggttgtggaataaaatgcaattgtttagaaaggatttcttaaatagaaaagacatatgtttaaagaagcaaattagttacctggaaatgaaattctaaactatttgaaaaaccatgggggccgggcgtggtggctcatgcctgtaatccc

SEQ ID NO: 2219 - DNA, 1600 bp, Homo sapiens
  misc_feature (1)..(1600): DMR16:2603101
caaatacttgtgctttaggtgtagttaccagatgatgaattttcctcgtatggtcagtagtcttgtaataaaaagcatgtagagtgtagaggtttgctggcgtggctcttcctttgaccccgccacggagtgggggcgcggttgggggcgggtgtctgccattgcccgctagcgttggcgccccaagctcggtttcactccctccggaagtgggaccagccggctgcttttcccggatggaacttccgcctgccatgtgaccggcgggtgttctacaagggctgaccagtgggcgggacagaacgcaaagggcgatattaaaagccggactcttccggtgaagcggaggtgtggtggggcttgctgggatcatggcggggaatcactgcgagctcctgccgctggcccgtggcaggctcggggcggggttggggtggcttcttgtgcctcccttaaagcgcggggctcagcgtcctggcccagcgccccagcagcaggtccaagtgggtccggctctacagcggcggcacctacttcctcaccactgggcagacgccgctgtgtcaggacccgaaatccttcctgtacctcttgagccaggccgaccccgacccggactcggacaaggtgaggaccacgtgggccagtcgaaagggcctgggccatttcggcctgtggccgccgcacacgccctgctccacgccgaggagagctcagcaggagagggcgactctcctcgggcttcgagcccaacactcccttgtcgccagctcatccccagcttgccccgatcccctatcctgggaggggagggcaaggatggcgccctggtgtccactgcctttgagaatcctgagtcgcttcaccttgggggtgtctcttcctcgccctctttgctctttggtggaggaggcttccgagaccccggactttgctgtgattctactttctttttctcactaggttcttttgcccagggtgtgtgaacgccttctcttctctgtcccagggtacttgctggctctggagacagaacccttggcgtttcacattctggacgtttgaattaacgctgacgtgggggttgatatgggcggccctttttttccctggtgacttgtatttagagagttggcgctccatcctttccatccacagcacgcagcacccactcagcacctcttagaagatgcgtccatagtatatactgtgatttttcgaaggggattttgctcatattaagggttgctttagggatgtccaggaagggccaggtaaggaatctttcaatctgctttctaattggcttagttttcccactgtcttcgcaaaaggacaggaatttccaggttagtttgcagcttgtctttcatcaagcgaaatgctcatgctgttgggtagatggtaatagaaaccttttgctacctttatttatcaagagttgtggagccgaggaaccgtgtcttgggagttgtgcaggattgaaactcacaaaaaagcctgtttgaagaagttgttacctatatttattcaaggcagttcacaagccttatactaactttgcggggtctttcagttgagcttacatgactgcgcttgg

SEQ ID NO: 2220 - DNA, 1200 bp, Homo sapiens
  misc_feature (1)..(1200): DMR16:2643701
ttgggaggctgaggcaggagaatcgcttcaacctgcaaggcagaggttgcagtgagctgatagcatgccattgcactccagcctaggcaacaagagtgaaatttcgtctcaaaaaaaaaaaaaaaaaaaaataggccgggcgcagaggccaaagtgggtggatcacttcagcccatgagttcaagaccagcctgggcaaacacagcaaaaccccacctctactaaaaatataaaaattaaccaggtacggtggcatgtgcctgtcgtcgcagttaattgggaggctgaggtaggaggattacctaagcccggggaggtcgaggctgcaatgagccaagatcacatcactgcactccagcctggacgacagagggagatcctgcctcaaaaataaaaaataataagtaaataaataaaaagaatatattcactattttgcttatcaaagtctcttaaaggaggtgacttacctacgctatggacccaattactcagccaataagaggacacggtccctgcccatagaaagctgatgtccagcctgacctcaatacaaaaccatccagttaaagtggtgggggtggctatgcagagacgggcgggtgccgggagagtcaagggcagccccttggctggccaggggctcagacagaccagctggggagatgcatcactcgcccaggaaaactgatgacagcttagatggcactgcaagagcagggaggatcacactcatgtccagaaagtgaaacataaaacagctaaacatgtaccacacagctttcatacaaaaattttatatacacaaattttgaaaaaatagagatggggttttgcttgttgtcccggctggtttcgaactcctgaactcaagtgatctgcctgcctcagcttcccaaagtgatgcaattacaggcatgtgccaccatgcctggtgactttttttctgttttgagacggggtctcactctgtctcccaggctggagctcagtggcatgatcatagctcactgcagtctcgacctcctaggctcaagtgatcctcccacctcagcctcctgagtagtgggaccacaggtgtgcaccaccgtgtccagctaatttttgtagagatggggtctcatcatgctgcccaggctggtctcaaactccagggctcgagtgatccgccatccttggcctcccaaagtgctggattac

SEQ ID NO: 2221 - DNA, 6400 bp, Homo sapiens
  misc_feature (1)..(6400): DMR16:4200301
ttaacaccggcccaggcgacaccaaggagagccctagatgttccggttctccgagacaaaccacaaacagggccctttcctggtgctgtggtttcggctcctcacagcagggggcaccgctggcctatacaggaggtgggaggtgagcctgggagaggttacaaggaagctggccagagactaggagttaagaaccaagcccaaaaggtgagtgcaggggcaaggaagcgggacctccctgcagagcgccatgccctggggactctggagctcctggccctgctgctgtacacacaagtttcctaggagggccaagactccgggtcttagggccaagagagaaagaaaaacccttcgggaggctctgcaagctcataccaatagctgtgcatccactacaaaggggggcgataattggctgctaggctacaaaaaatagtacaggtagctgtggaacagggtattccctgcttccagctgtgtgatcctgggtaacccagcacgtctctgggcctcaggctcccctctgtagagcaggaagaatacaaaccctattacaccctggccacttacagccatccagagcatcaaatgagatcatatagaaacagcccaattaacacagggaaagatttctaatctcattcaaaaaacaataagataccactgctaaattttttaaagatgagtaacatttttaaattgcattgctgttgggaaacaaggactctcatctactgttattgtgagtacaaattggtatcatgggagacaatatggcaacaactagcaaaatgtttaattccagggttccaatttttttttttttttgagacagggtctcactctgtcgcccaggctggagtgcagtggtgcaatctcagtttactgcaatctctgcctcccaggctcaaatgatcctcctgcctcagcctcccgagtagctgggaccacaggcgcatgccaccatgtccagctatttttttctttttttgagatggagtctcactctgtcacccaggctggagtgcagtggcacaatctcggctcactgcaacctctgcctccccagttcaagtgattctcgtacctcagcttccccagtagctgggattataggcacccaccaccacacccagccaatttttggatttttagtagaggcagggttctgccatgttggccaggctggtctcaaactcctggcctcaagggatctgctcgcctcagcctcccaaactgctgggactataggtgtgagccactgtgcccggccatcggattgtttttaaaagtgctatgagccatcacgctgggcccaatttttgtgtgtgtgttttgtttgtttgtttgtttgtttgtttgtttgttttgagatggagtcttgctctgttacccaggctggagtgcagtggcacaatctcagctcactgcaacctctgcctcccgggttcaagcaattctgttgcctcaccctcctgagtagctaggattacagccgccagccactaggcagggctaatttttgtatttttaatagaaacggggtttcaccatgttggctgggctggtctcgaactcctgacctcatgatctgcccgccttggcctcctaaagtgctggtattacaggtgtgagccaccacgcccgcccctaatttttgtattttttgtagagatggggtctgactatgtttcccaggctggtctcaaactcctgggctcaagccatcctcccacctctgcctcccaaagtactgagattacaggcgtgagccaccaggagggtgctggttttccagagcatggcgtggtcacgcaggggaggagcacacagctgtcagagggaaggagggaggtttccacacacacagctcacctaacaggatcccatgtttgtaaaaacaaaaaacaacatccatctatgtgctcacacatgaagaggaaatgcttggaaggcttcactataacgatgtgtttctctgggagtcgaattaaagaagttggaggtcggctgggagcggtggctcacgcttgtaatcccagcactttgggaggccgaagcgggcagatcacgaggtccgcagacagagaccatcctggctaacatggtgaaaccccatctctactaaaaatacaaaaaattggccaggcgtggtggcaggtgcctgtagtcccagctattcgggaggctgaggcagaagaatggcgtgaacctgggaggcagagcttgcagtgagccgagattgcgccactgcactccagtatgagtgacagagcgagactccatctcaaaaaaaaaaaagctggaggtcaagaatataatttttatttttcaacgtataccattctgcactatttgaatttttgcaacaagtgtgtcttatttttattattttgaaaatcaattttgtaaagaatccaggcccaagggaagcagagtggaagggcaatagcaggaggggaaggaacggagtgatcagaggactcaggcaccacccatgagtagacagggggcacctgtggcctctggagcacaggagggattgaaataggcatcatcgcctttgaaaactcaaatgtgcatgactgaagcataaaggcttaaaaccaaaatgcatctgtaacaccctggtaaagcatcgcgctgtgctggtgaaagggtagttccgtgatggaggtgtcgtcctttccaactcccagggggagcccagacccagacccacaagtccttgcacacatcatgaatgagctcctgaacctgtgtgggtaccgggagagtccaggccggtcagcagtgtggccccgccgacaggcctgcgccgtacccgtaatctcaagccctacctgttatctcaagccctacctgtgatctcatgctgccggagctcattgtacttgtaggactgctccagaggcttgatggatgagtggtagatcttccgaagccgctgcagcaccgctggagacagagagggccgggggaagagcatcacgcaggtgcgatccaggcagctcctccattgtggaggggcctcaccacccagggcagctccacccctgcctggtgggcagcaagtgctgtttgcagcccagcgactgtgcaatgtatttgcatatggggagctggcccacatctcaactcgcagaaacctccaaatgaaaaggcattctcctacccacccccaaagcttcctgaactgtttggttattttattttattatttatttatttatttagagaaaggatcttgctctgtcacccaggctggagtgcagtggtgcaatcatagctcactgcagcctctaactcctgggctcaagtgatccacccacctcagcctcccaaagtgctggaattacagacataagccactgtgcccggcctgagctgtttttttttaaaacctctctcctccttcctcacctcagtagtgtgtctgaaaccttgtctcggcctgctgcctcactgcaagccctttctttggtggatgagaattccatctctgttgcccacctctgtgtgtgctccctgaggcttagaaggcaaagaggcccagcacccagcaggcgcgcagaacagcaccctggccctggcgttggcctgtcagtgtactcccagacactccccggaggggtggggtcagataacccaggtggcctctttctaagagttagctccctgctgggagcccacagtgggaaggcctatggggtgacgagtcaggctagcgagactctacccctcgatccgccaccctctagccgtgggccaggagcaaatcgctgctagcctgagctccagttaggtggctcattgattaagaggagacaagccctgctgcaatccttgggtttcaaagataaaatgaaacagcacacatgaaacggctttataaactaaaaatcacagcgagggagatggcatcagcacagcatggggctgcactggcttcgcccacaccaggccgtctacttggatggcccttcctcctctgtgcccacctggaaccccaaggcttggaccttgctcacagagcctcctccacgaagcctcccaccttcagggctctcctcttccccaacgtcccctccagcctccaagatagatacagccccggcctccaagatacagccccggcacgccctggctctcaggagcctccaggagtctgcccgggccctggtggccgggctctcccagccctgggcatatctccctcccctggttaccagagtagtcatcggatggcttgtcctcattcagcatgagggtcttctcgatgtgggagcggtccctcaatggggcttcttcatttgcatcctccgtctcttctgtggagagaagcagacagccaagtgagagcaaagctaacagccagctgagctctgggccccggcacagcagacgagggctgggcctcaagcaggggctcaacagggtcttgccaagttacactggactgagctctgcctttaggaaggaatttgatcatccagactctatgaagttccatgtgtagtgtattcgcattcggggagctggtccacagctcaacctgcagaaaccttcttatctatttatttcatatattcaacaaatatgcattgaacaccttcgccacgccaggcactgagcatcatgctgggaatacagtggtgcccaaaacaggcacaactccttaggcagctgctcttagtccagtggagtcagagatgatagtctttaaagtaacgctagggccgagtgcagtggctcacacctgtaatcctagcactttaggaggtccagatgggaggatcactggagcccaaaagttggagaccagcctaggcaacatagcaagaccccatctctaccaaaaaaaaactttccaaggagtggtgcacacccatagtctcagctcaggaagctgagacaggaggattctctcagctcaggaggtcaaggctgcagtgagccatgaccaccccactgcactccagcctaggtcacacagcaagaccctatcttaaaaaattaaaacatcaaacatctcaggaggctttagggctaggtaggagaatgccttttggcttgaaccccagcctgggcaaaagagggagaccctgtctcaaaaacaataaaaataattaataaaatgtaatcattacagatgatgaggtggccacagaaggaaacattctgaaagctaagtgcggctcaggagtgtgcctgcaccagtggtctcagcagcacggtcagagaaggcctccccaggtctctgctggggggagtgagttaggtgaccagtggagagaagcgttctgcaaaagccccagacgagccttatttagcaagaagcaggagaaggggtgtctggctgcagctggggaggcctgggtgctggggagctgctgaggtcctcagggctgaccgggcaggaccttccacagggctttgggtttcatcccaagagcaatgggagccagtgaggggctctaggcaggcagcctagcgtgatagtgcatgcctgtagtcccagctactcaggaggctgaggtgggaggatcgcttgagcacttgagctcaggagttagaagctgcagtgagctatgactgcacgactgcagcccagcctgggtgacagagtgagaccttgtctcaaaaaaaaaaaagtatgtaaattaattcttcaacgaagcctgtggggaagccatcttggagagtgaagacttgacctcgacctctaccctgaaagccccactcctggtctaagtccatgtactaagcagatgcagccatgaaggtgcctgaccgaccctcgtattggctgcaattctcacactgcccgagagcttagcccggcccttccccctctgctcctggccccgagccctttgagggcagctttggctgctttaggtgggcacttgagagtcaacagcggtcacagcctgagttctcatctcatgatcctgacccctcagtcctggttctgcaatgcttcctacagcctagtcttcaaggggagaccccagtcctagcccactaagggaatcaccagggaagttcccaacccacccccatccattccctgcacgtccctccacccgctggccccggggcaccaatcattccattagctcgctgctcctttaggctgaggcactggcatgggctacggcgcatcagggaccctaaggggaggttctggggcccctgactcggaagtaccagggcccctctgacccctctcactggcccctccaagctggaggccagtggccaatgcacagcctgaagccacctccccgggccgggactgtgaaaagggcctgccaccctctgccaccttctgtccctgcctgtcccctacacacaagacttccagggagaatgcagctgcccaagggacggg

SEQ ID NO: 2222 - DNA, 2200 bp, Homo sapiens
  misc_feature (1)..(2200): DMR16:4283801
cagaaactgtcctctctcctttgtcttcagtgcacaccgtcttttggatcatacccattactaacaagctgttactattctcctttcaaaccaacggactgaccctagatccccttagctctgctctcttttcttggttttgagacagtctcactctgtcacccaagctggagtgcagtggcatgatctccactcacttcaacctccacctcccaggttcaagccattctcttgcctcagcctcctttgtagctgggactacaggtatgtgccaccacgcccagcccagctctggaatctaacagcaaaactccttgaaatggatgttcacactcactctctccccttccctcctgctcactccatcacacccccatgactgcatgggggcagtgactcacttctgtaatcctagcactttgggaggtcaaagcaggaggcaggaggatggcttgagcccaggagttccagaccagccgggcaacatagcaagacttcatctttataaataattaaaatattagccaggtgtggtgatgcacatctttggtcccagctactactctggaggctgaggagggaggatcacttgattctaagaggttgaggctgctttgagccaagagtgcaccactgcactccagcctagaccgcagagtgagaccctgtctccaaaataaaacacatatggctgggcgcggtggctcatgcctgtagtcccagcactttgggaggccaaggcaggtggatcacgaggtcaggagttcaaaaccagcctggccaagatggtgaaacccccatctctgctaaaactacaaaaattagccaggcgcaagggcaggcacctgtaatcccagctactcaggaggctgaggcaggagaatcgcttgaacctgggcaacagatcgcacctgagccgagatcgcaccactgcactccagcctgggcaactgtgagactgtctcaaaaataaataaataaataataaaacacacacacacacacacacacacacacacacacacacacacacaaacccttctcttttcaaagtcacgaggacctccaggatgctacatctgggtctctgttttctgccttcactgcatctgaccttcttgaaattctttttttgctttgcgtctaggacatgcccacggcacagccctcagacctgtctctgtctacacacactccctgctcttcagacaacagacttccagaaaccactagcagccacgaagtgtggtacagaatccaggtcctgcctgaaccccaaccctactaacctgactctgctctctcatctgcaaaatgaaagccacacagcatctccctggcagggctgttgtgaaaagctggtgacagcctggcatgtcacggcatcaatgagtgttggttgctgtcatccctggcaccaagttgccatgggcggcagtggccagaggcgtctgagctgaccttggagaacgacaagatttcctgatatgtagggaaggtcggaggtggggctcagcctttccccttcccagctctacgtggcagcaggtgggaggcagcaggcatgcgctgggctttgctgttcacacagggtgcacctgcttcccactcgaaacaccctcatgtggtggggcagtgaaaattggcaaacaaaccacttgccctgtaaaaggtgggtctcttggccggtcacagtggcttatgtctgaagtcctggctactcaggaggctgaggcgggaggattgcttgagcctaggagttaaggctgcagtgagtcgtgatcatgccactgcacttcaacctgagcaacagagcaagaccatgtctcaaataaataaataaataaataaatacaaataaaaggtgggtctctgtaaaaaaagaaagtaatcagcagagtgtggtggcacacatctgtaatttcagctactccagaggctgagacagaaaaatcccccaagtccaggattgcaaaggcagcctgggcaacagagtgaaatacttcaaaacaaaataaaataaaataattaaaaaaaaaaaaagggaaggccaggggcagtggctcacgcttgtaatcccagcactgtgggaggctgaggcaggtggatcacctgaggtcaggagttcgagaccggcctggccaactggtgaaacttcatctttactaaaaatacaaaaattagtcgggcatggtggcgc

SEQ ID NO: 2223 - DNA, 1400 bp, Homo sapiens
  misc_feature (1)..(1400): DMR16:4372701
gaggtcccctgtggtcactggcaggccagccgattggtgccaaccattctgcctctcccccattcgttaacgattgccacaccagggtcactgaccgcctcccctgctgtggcccaggggtggagtgtgcagggtggaaggaagaggtcctgggggtctaggtgtccccatgcctgccttttgcaccaaggacaggtgaggctctggagagaggcagcgggacctagagcccccttccccaggctgagagcctccagggctggggattggataaaatctccaaggtcccttcacactagactgtactttgggtgttgagggcatagaggggtggccgggctgggaccttccaagcagggtccattagggccagtccagggggcagcaaagtccaggatgggcccagctattgacaaaaacccaacagagctggggcaggcgggtgggggatggggagcagtcccctgagtttactctcttctcccaggggagttggcctggagcttctgtaaacagagtgtcagaggcaggaagaggctctggtgatgagcagcccagctggatcccctccagaccattatctagcctcccctgggcctggggagggaggatgcgcacacacatgccagcctgggggccgggcactgcctgtccccaccccgcccctgtctcctgcacgttggaacagctgtcctgctacctgtgggtccggagggtcagatggggatggggctgggggctggggtcccagggcatttgtccagatggcacctctctctccatattctgggaatgggagaatgggattcagcataaggagcctctcagacactgcccagacctgtgcttacccgaggaaggcccctctggcacgcagcccaggggccagggagatggcaagggagatgccccgggcaggagatgggtccgcggctcctagctcccattactgtcacccccactgacagccccgggggagctgggacaagtcccaagtacagaaaattaagtccttgcctgggcttataagtgggtcccaacacaacactgggcagcctctgggaacaagaaagcagggccctgctgagcccaggagggagctcccacctcagcaggccagacagccagtcctgccagtgagcagaggtgtgtagaggggaggctgcccacagggatggctatccctgaccactggccagccctgagctcatgggagggcagcaaggccacctaactctgttagtgacctctcctggaccccccatcagctgcccttagagtcccctccctgggctggggagcccaaggctctgtgctgccaagaaaaccagctcccctcactgctgtggaatttgcgtgagttcttggagaagggggagggtgcacgtgtgtgtgtgtgt

SEQ ID NO: 2224 - DNA, 200 bp, Homo sapiens
  misc_feature (1)..(200): DMR16:5463101
aggaaaatggttagaagaatacacgtcaaccttgcatccctggttgtacttccagggttgagtttggagagtagtagggagttttctcttcctttataattcaaagaggattggttggtaacataatacggattttgttttttataaatccaactgacaccttacttttctgggatcacacatactgaaaatggattttt

SEQ ID NO: 2225 - DNA, 200 bp, Homo sapiens
  misc_feature (1)..(200): DMR16:5702201
gaggcatgactgggagacctcaggaaacttacaattatagcagaaggtgaatgggaagcaagccccttcttcacatgccggcaggagatagagcaaaaggggatgtgccccacacttttaaaccatcagatctcgtgagaactcactcactatcatgagataacagcaagggagaaattcacccccatgatgcagtcacc

SEQ ID NO: 2226 - DNA, 1500 bp, Homo sapiens
  misc_feature (1)..(1500): DMR16:7352001
gattcgtgggctcagttcttgacttggggtggctgagagtttccccttaaataatatgtcacgctgtaggcatatggtcttgcaattgcggggtgtatcatttccacttgattgtcaaagcaccccacggcagaaacatactaaaggatctctgctccagatacagccatggctttgcagcatggcagatttgcagctttgaggtggaaaacatttttcagcctttcccaagaggtgaactggatacagctgtgcagtgtaacctaaatctttgcacgtgtctttaaacagggcagaaacaactggccctgtccttccactctgggcctgatgatgaccaagtcggagagaactgaagctatatatcctgttctcagaagttgaatttccccatcttggacagagtagtgtgctgttgtgggaatgcgtagctattgccttactcaggtgaatgtcatctgaagacgtggggtgggtaagaatctgtcaccactaaacgcttactccgggctgcccatcactgctgtttggtcagtccttttgttctagggccctttgcagccattctccaggaagagtcatcctggccttgccttcagaaacaagctcgctatatttcccatgtagttctagaaagaatcctggtgcagggattctgaaggatgcactcttgtcctggatctgcccctcaatgtctgtgtattaatgagcaaattattattattattattttgagacagggtctcactctgtcaccaaagctggagtgcagtggtgcgatcatggctcactgcagcttcgacctcttgggttcaggtgatcctcccacctcaacctcccaagtagctgggactacaggagcatgccaccatgaccagctaatttttgtattttttgtagagatgaaatttcaccatgttgcctacgctggtatcgaactgctaggcttcagtgatctgcttggcttggcctcccaaagtgctgagactgcaagtatgagccactgcacccagcccataccacttttccatatggcttcaggttacaggtttgtgcatgagttacatagtggaaccctaaagccatacctttgaccagttgtctaaagtttttagcaccactactactgtatagctaatattttctttgaatggattcaatttttgtagcctaaattgattcacaaaaaccatacttttcgtctctaatttaactggacattcaccatcactagccataaataaatggtacctattacaaatgcattgatgaccctagctagaatggctataataaaaaagatagacagcaagaagtgtcagcaaagatgcggagaaattggaatgcacatacattgctggcaggaatgtaaaattccgcagctacttagaaaaatagttgagtatttttcttaaaaaaattactcagttattatgacccagcaattctgctcctaggtatatattcaagataattaaaaacatatgtgtacacaaaaac

SEQ ID NO: 2227 - DNA, 1400 bp, Homo sapiens
  misc_feature (1)..(1400): DMR16:7509601
gatttcaaaatcttccaagtcatcatcagttatggtatttttaagatcgatttgcagttaaccacacagctttattacaaattcatgctctcttgatgtactcacagtatttttcaaaatttacctattgctatctctctatctctttaaacttttttcatccatcctctgtctcttcccttttatccctgaatgtttgccctcccctcttaagaaaaaataagatagtagcaagctccctgctggattttataactttgcataccatatatttagtttagtaatgaaaaattccagctccaggcgatgcatagaatcgcatttctaatgttttttaaacagctattaatgtggtcgagcagtgggttttttttttttttcccttcctcctctatataatcatctgctcagtggtgcgctgtgaaactgagagtaggagccagaggaggagcaagctgtgattgatgggccaggccttcctggcagaaaaagtgccatctgggttggttttgggagcagtcagatgttgagggggaggtcagccaggcggcctcagccccccaccttcctcaacaccccgatcatccacacattgcacagcgcgcacaccctcgctcgtaattgaggcgtgcttggggcagatgctttgtggtgtgggacaagaacagctgctaagtttatggaggagaaaggaagcaggatggtgcagcaggtatttttgtttttttttccatttaatctttcactcaaaattgcgatttgaatgaagctgaaagcttttcttgtgttaagtccgtgctgtcggtgacacgtagcttgctgcttgaatcatgcccggggaaaggagaggagttttggtgaagagagtgtgtgtgtgtatgtgtgtctgtgtgtgtgtgtgtgtgtgtgtgggcgcgcgcgcacgcgcgcacgcgcgctttctgcttgatgtgtggaactgagctgatcttagaaccagcaggttaatggtgtccttttgcatttttcttctttgtttgaatgcccctagggcatgatgcagtttagctcaattcacttctgcacaagagggtttctctgaatatgcgcgatttcttgccagagaagtggtgtagaccatgctcctaaactaaagtaaaacaaactgtcagcaagactgaaaactgcaagcaaccatcaagaatggatagttttcctccagtgagtccatgctggtggggggtcccactgcaggagccgctgctttcctgggctgtgtgggcatatgtgatcagctggcttattaggttttgacaattcctgtgcatgtcttcattataagggttgagttaaggccagaggaggttctccacagcaggaaataaactggggacaagtaaattccagatgcagaaagggag

SEQ ID NO: 2228 - DNA, 400 bp, Homo sapiens
  misc_feature (1)..(400): DMR16:7523501
atttgaatggcaatggatgcccgaatttggagaatgtaaatgtatggtggaccggttagctgtctactctgtcttctccagcaatgtttggatggtacacactcttagaggtaggattttaaaggaaagacagccattaggggctgaagcaggtgggctttggggctgatcctgaaggaagttttaagacttatattctgaactggtattgggtaagtgcgggaatcataaaggggctgtctcgttttttgttacaaacaattacatctgtatactcatctctctttggccaaaaaggagatgtgacttttcagttatcctttcctgatctacaccagcagaacgtggtctatgacaagtttacttcaaattgtctctgcctcctcctacatttatgggg

SEQ ID NO: 2229 - DNA, 1500 bp, Homo sapiens
  misc_feature (1)..(1500): DMR16:8214801
gagagacaaaaggagtaagggagagagagaagaagaattccacaccccacaccatgatgtattattacggaatttcagaacatttaagacacaggatggtcattaaaatattttaggaatgggatagaagtgggaagagaaggaacaggtcacatacaaaagaataagaatcagaatggcattagaaatctcaatggaaacatcacaggctagaagacagtggatcaatgtcatcaaaattttaaataaaaaatgattttcaacttaagtttctatacccaggcaaattatcaatccagtgaaaaggtaaaatagaaaattttccaatatgtaagtacaaaaaaaccttctgttcatgtacctttattcaggaaactcccagaagatgagctttaacacgatggagtagtaaatcaagaaagataaatatacaagatccagtacacaaaagacccaacacaggactaaagaagaaaacagataagagaaggtagctgtgcccaggctagagaccaaacagaggaagaagggtgtttatggactgttttttgtgtctgggtatgagcattgggtaaaagtgtttatgcttcacctatcagttgcagtatgtgtcagacgttatgctaatcactgaaattatatactttaattatcatattatatggaatataattattgtacgtttactattacaaaattgctattatttatgttattattaagttactgttacctcaccagaggaaaacatctaaatgggtttccaccctattttaaagattttgaataaaaatacaaactctaagattagcataaattttgctttgaagaccaagaggaagttatcagctggaactgatccgcaatgagagatgtaactgcctgacaagagacataagccatggaagaaaagaaagaaaataaacaaacctcaaacatggatccaaaataaaaaggagcaagaaagatgattcaattataggaattgatgtatgactgtgctacttcccacaagggcaaatctacctgtccctgggtgaataacagcagggattcatgtatatggtgaaagctaacaattctcccctgaataccagaattccctgtccacaaacagctcaaatgtcatgggtggacccataaacagaaatgcgaggctgtggtttgacaaggacagaagtagcagcatataaaattgttgtccggaagagtggtccatccaccctccctgaagaactaggatctttctaccgaaggagtcccatgggaaaactaggaattggcgaggtgggaggagctgacacggtatctgtggtggatgggagtgcaaatttgaatacacacgatcataaaacaggagagacaggaaaagagatgaaaattgggctgtagacagactgcaaaggatttcaattttcacatttcataaaggtaactgctaaagtttattccaatcatactacagggcaggtattaggctaagcacttattttatttaat

SEQ ID NO: 2230 - DNA, 2900 bp, Homo sapiens
  misc_feature (1)..(2900): DMR16:10342601
ataaatttgcttttactttgctgtgcggactctccctgaattccttcttgcgtgagatccaagaaccctctcttggggtctgaatcgggacccctgtgctgtaatgccccactgccacacagcctcttccatagaaactgaagttcctccatctgcctaagatctagaccccccacagagaacaattggtttttctttctctccctttaaggctaataatttaaccacacctgaacagtataatgactgtctgcaaggatcatttaaatcataaagagaattgtttagaagttaatctatgctccactcattcttcctagtaaccactccaccaaattcctcctatcctccctcccatcacctgttttaccaggatccaagctcatattctctctgtaacctcaagatgaaatagaagcctttttacttcactgggatgtcagatcttcattttgaaagctctcatgtaaggctgaagcaggagatataaaaagaaaacatgaatttttgctttaggcagctccccacccactccctgctattgcaccctgttctgtaagttctgtaggcttgtaaattcctgtgttccgcagctggtttctgtaagtacctggtctccatcaaggcagcacagcgaaggtcacaagataagcttgagcaagcctagattgcagccatctgggcaccacagtgaaggtcccaagataagcctgagcaaacctaaattacagccatatgggccatacagcaagggtcagatgacatgcctaagtgagcctgacttgcaagcctgttactgttgataaacggtccctgttctgtttctgtaaacttgctttcacaccactgcattttgcgccactgtaagcttgtttcaaactagccaaccacccttcagatgcatgtacaaaagtcaagccgtctttgttcgcagctcagtcttttggatgcaaatccactgagctggtgcgcaccttaataaaatccttccgtcccacccattggtctctctggtctcctgattcctgcaacaaggctaggcaaggtggctcttgcctgtaatcccagcactttgggaggccaaggcaggtggatcagctgaggccaggagttcgagaccagcctggacaacatggtgaaaccctgtctctactaaaaatacaaaacttagaccagtatggtggtgcgcacctgtaattccaactactcaggaggctgaggcaggacaatcacttgaacccaggagatgcaggttgcagtgtgctgagattgtaccattgcactccaacctgagtaacaagagtgaaacttcataaaaaaaaaacaagaaggctccttggtatatgtgttaaataaatgtgtatgccttttctcccacttctcaaactacctcatgtcagagatttttcagcaagcctttaagggacaaagtgccttggccttggagtgatacagctgcagatcaaggaatgccaaggaacacctggagccacctttctagaagaggtgaggaaggatcctcccctgaggccttcagagcaagcatggcccgaccaacaccttgaatgcagactccaagccttctaaactgtaagagaatacatttttgttttttcaggtcaccccatttgtagtaatttgttatggttgccctaggaaatgaatatgttaccagaaagaggtcccaatccagaccccaagagaggcttcatggaatttaagcaagaaagaatttggggtgagtccacagagtaaagtgaaagtaagggaataggcccagcacggtggttcatgctgtaatcccagcattttgggaggccgaggcaggtggattgcttgagctcaggagtttgagaccagcctggccaacatggtgaaaccctatctctactaaaacacaaaaattagccaggcatggtagcaggagcctgtaatcccagccactctggtggctgaggcaggagaatcacttgaactcgggtggcagaggtcgcagtgaactaaaattgtgccactgcactccagcgtgggtgatcgagtgagaccttgtctcaaaaaaaaaaaaaaaaaaaaaaagtaaaggaatataaggataactactgcctagacagaacagggtgttcccaaaagcaagagaaggaaggtgcccaccttaggtacaatgcctgtttatatataagacaagccaaaaaatcaagggggagattttctctaatgcaagctcttgtgacaaagaattgttaacctttgtgtaactacagacttttgcaataatctatttatttatttatttatttatttatttatttatttatttaagacacattcttgctttgtcacccaggctggagtgcagtggtgcaatcttagttcactgcaactttcacctcccaagttcaagtgattctcatgtctcagcctccccagtagctgggactacaggcgagcaccaccacacctggctaatttttgtgtttttagtagagtcagggtttcactgtgttggccaggctggtctcgaattcccgagctcaagtgatctgcctgccgtggcttcccgaagtgctgggataacaggcatgagccactgtgcccagactgaaatcttatctttaaaatgaaacttattctcgaaaagaatgcttttgtctttaagatatcagggcattgggacatttcttgggtttgttaagtcctggatatgtttagtaaacttttttttttttttttttttttgagatggagtctcgctctgtcacccaggctggagtgcagtggcgcaatctcggcttactgcaacctccgcctcccaggttcaaaggattcaactgcttcagcctctcgtgtagctgggactacaggcatgtgccaccacacccggctaattttttatattttta

SEQ ID NO: 2231 - DNA, 2200 bp, Homo sapiens
  misc_feature (1)..(2200): DMR16:11045601
tcagggaaggctcatcactcgtcagccatggtggattaatccataggtcaagtagtcattttctagtttgctggcctccggatcaggtctctgcagatcctgcgagtgatggtttcccctcttaacgtggctgatgaagatcctcctacatggggaaggtggcaacactgccatttccttgtcccctgtactttcattattcaagccctctttaagctgctgtttctttgcaggaatcgttttaagcgactgcattattgtcagtgtttgttgagataaaatgaggttatatgatttggagatcgaccttgccaggctcagatgaccccatccagctgcagcagtggacatacccagacaagggtggcaccgtggtgggcccctacacactgaggaggaaatcccactttccccttagaacatcccaaaccgcacttggcctccaagtgaggatacaccctcactagcaaagcccacgagaaagcagaaacctcagggttgcattagtcatctttgaacctctttccagtataactgccctaagtttatgtcctctagaaagcttttggattgcaaaaacagaaagacatataggtaggcattttcccagagggttattctttattattaacaaaaggagagctttatttaaattctggatcccttctcccaacccagatttttcttacttttatcccataacatttattataccctaagtataatttctcagcagcttttagatgttttcaggaattgtctttcctggtggtggtagttatgtcacacaagaatattcaaatttagttgtagttctgacaactgaaaaaacctaaaaaggatctattccctttcccaccccaagtgtggggtgtgtgtgtgtgtgtgtctcattcagaacttgtgagagagatgcagcagttctaagggtcattgtccagtagagattaccatgacagtgagtgctcacactgacccaaccctgaacgagtgacaggttctgtgcctcctcgcatttcatgtgcattaactcatttcatcttcacaataccctagacagacatgccattcatgcagtggaacaaggaggcgagaggtgtaaagctggatttggttatgtgtatcagaaccaagactatgcccaccgtgctgttctgaaggggccctcccaggcagtcatgaccctgaggaacaacataaccccgaaagcactcctcataaacaaatagaacaagccatgtaattgtaatgttaaacttatttaattatactcttccttccagaggtgtggagccttgtatctttaatgtggtaacttaaacaggattgtccatttctccagccgttctcgacaaaatagataatgttaaacacttgaaatattagccttttctatattttaatcctacatagtagttttttttttaattaactgctttgacagaagaattctaactccatatacttaaaaaggaaggagaaaattttgaatagtgcaatttgatatttggtctgtcatttgagcgtgtgtgtttgtgttcacgtgtgcattttacttcctggtgatttacgagaactcactaatgagaaacagatggcctctaaagccacaaactagagtttataatactctgttgtttatggaaaaaaatatgaataatctcctcttccctcccttcctttctttttagggagaagacatttttttggacatgtttgaagatgagtataggagcatgacagtaagtgaggggctgggacacacttgggctggtgtgcgcctgtgtccctgccaagctccccctgcccatcccagagggagttttttgacttagggctttgtgaccaaatagcacagattgatggggaagcagatttagaatggtgtcttgtgatccccaccactgttaaaatttcagactatattctctccctctaacatgggaggtgtccgatgaatcaggatgattctctgctatgaatagtaattttggggacagtatcattttattgaggacttactctgtgctggatgtatatagcatgctgtacagattatatctcttcatcctcacaccaaccaacggtaatagctactgccattgtccctttcttgctgaattagtctcttctcatactgctacgcagaaatacccaagactgggtaatttataaagaaaagaggtttaattgactcaca

SEQ ID NO: 2232 - DNA, 1800 bp, Homo sapiens
  misc_feature (1)..(1800): DMR16:11189101
ctttggctccactctgcagcactagctcccgggccaggctgggcgtggcgtagatggaagatggtaaagaagccagctagaaaggcaggaacgcagcgtgacggtgccatacccagagggcctgcctgggcagcccccagaggccttcaaagctacactggagagcttggccgagggaccaatggcaatggcacacactgaagtgttttacacaaaaaaaaccgcctggctggatgtggctggcaagaagatggccggagctgcaggtgacgagtgatcaagaggagcccatggcagtggggacaggtcacagctgaagtgggtgacctgcaacatgttcagcaggtaaaattgacaggtttggtcggactggccacaagggagaggacgggtaaaggacagctcttggtctctggccaggccggcggctcaacaagtgtccaaacaaaccatccgtgtgcccggtgtctacctgagctgccgtcacctcttcctttgccgggtttcatttttctcttttgctgtgttgctgcaactggttgccaaaaggactgcacagctctcctggcaatttggcaaagtctagaacaacagtatttcccataatctcaccattaaaggacaacccttgtggacatcctggcagatttctttctggtcttttttctatgcattttagaattgaaataacacagtgggtgtcatttcatgtcatgcttttgacccagcgtgacatgatatggttcatcatttctccacgatcctggaaactccattttttttttttttttttgagatggagtctcatgctgttgcctaggcaggagtgcagtggtgccatctcagctcaccgcaacctctgcctcccgggttcaggcaattctcctgcctcggtgtcctgagtagctgggattacaggcatgcaccaacatgcccggctaatttttgtatttttagtagagatgggttttccccatgttgccctgcctcatctcaaactcctgggctcaagcaatttgcccacctcagcctcccaaagtgctgggattacaggtgcgagccactgagtctggccatggaaactccatttctaaagtgtgtaacaagttctgctgcagggaatgtatccctgtggctagctgtgcaccctcatggtctatccacattttatattacctccccagaagaggtcctgagcatgggaattactagatcatagaaaggtaaaccatcttaagactctggctacaaattgccagattgctttccaaaaatattggaccactgacactctcaccagcgatgtacacaagtgcccatctcaccacagcctccccaccgccaaatgttgtacattttaaatctttcccgatttacagcccagctcagagttcacctcctctgagaagcctcctcagatttcccctctccatcctcgacattcccacagccagcggcccccctccctccacttgtccctagtccatcccagctggaggtctgacgttccagggctggagtctcctctgatccaggtgaggcccccagcagcttcccagcctcaatcagcctgcatattttgagtctcttgtagatggtgggaagccttctagtagtatcatcttcttttacagaacagcaactgagacccagaccagggaggctgagtgactgatcctgagtcacacagctatgaggcagtgttgctgcagctaaaatagcagcaaaaactcccacttaatgggcacttcctccaggccaggcttagctaagcagtttctaagcctaatcggagttcat

SEQ ID NO: 2233 - DNA, 200 bp, Homo sapiens
  misc_feature (1)..(200): DMR16:11232201
tctactaaaaatgccccccaaaaaaacaaaaatattagctgggtgtggtggcacatgcctgtaatcccaactgcttgggaggctgaggcaggagaatcacttgaacctgggagatggaggtggaagtgagccaagatcattccatgaactccagcctgggtgacagagcgagactctgctgagagagagagagaaggaag

SEQ ID NO: 2234 - DNA, 2500 bp, Homo sapiens
  misc_feature (1)..(2500): DMR16:14331201
gaaagctgcatccacaaagttctggtccccacaggggtgaggccaggccaccagtgtcatgccaggccctgtcttgctgctcccttgggagaattcccaccagaactgcctccctgcacccattccccatccctctggccctccctgtgtgccccctgaagaagtaggggccagtcagtggagagaacaggactctcaatcagatccaggttcaaattctgacttcaccacttaatggcaggatcggaaacctccctgagcctcatttttttttcatctataaaatgggcatacagttttatttaatgtttaaaaaaggcagggggcacgactgggcatggctcatgcctgtaatgtcagcactttgggagcctgaggcagaaagatcacttgagcccaggagttttagaacagcctgggcaacatagtgagacctcatctctacaaaaattttaaaaaataggccgggcacggtggctcatgcctgtaaccccagcactttaggaggctgaggtgggcagactgcttaagctcaggagttcaaaaccagcctgggcaacatggcaaaacctcgtctctactaaaaacacaaaaactagcagggcatggggggacacgcctgtagtcccaagttactcgggagactaaggtgggaggatcacctgaaccctggaggtcgaggctgcagtgagctgtgattgcaccacagcactccagcctggaggacagaacgagaccctgtctcaaaataataataaaatatataaagctggtataatgtgacctttgttgagttagttgctcaacacatctttactatgaatggacagtgacaaaaaaggatctagtctccaactcatggaactctactcaggggtgagaggcaatctccataggccactgcacctggcctcatgttccactttttaaaaaaattagcagtcacaactcccagtcatacttttcattaaccagaacatctatacttttcaactatgagtatctagttatggcaatcacacaggatcatttcatttaatttagcgctcacatttcttatttatttaatgtatttaatttattgagatggagtctcgctctgttgcccaggcttgagtgcagtggcatgatctcgactcactgcaacgtttgcctcccgggttcaagtgattctcctgcctcagcctcctgagtagctgggattaaagacacgcaccaccatgcccagctaacttttgtatttttagtagagatggggttttaccatgtcggccaggctggtcttgaactcctggcctcaagtgatccacccgccttcacctcccaaactgctgggttacaggcgtgagccactgtgcctggcctagtgctcacatttctatgagctaagtcacattattcccatcctgtggagggagaagcttaggcacagagaggtgagataccttgccaaaggccacactactggtgtggccttctgtggccctgtcttctgtgctcagccctctgtgcattgatgaagctttgaaatgccacagcagggccaggaaatcagtgctgccagaagactgaaaagctctccagatcattttccaaatgaagaaacagtggcccagagaagccaagtaacttgactggggccacatagcaaatgggtagctgagcctgtgttcacactgcttggggagatggtgcagggaagccctattcagtgagggaagccaactcttactgcccccatgtaatcctgtcctaaagcagggtggccagccatcccagcgtgcctaggactaggaggtttttgggactggagacattaggtgctaaaaccaggaaagctctgggccaactgggatgagctgggcattccatcccatagacagtaaggtgtctaaatggttatttccaggaaatgaggctttgggatggagctggctggcaagaaccatcaagaccccgttgaaagactagggttttatgtctatgataccctggagattccacctatgtgtcacctcagtggactccgcgggggcccacggcctggcatcctattctgcccccaaacagctaaagtgctctaaatcctaaacctaattgccccatgtcccagtatgcaaacctaaatggtttctcattttccccccattgccttaggaccaaccataaactctgctggcccaggagacccttggtgggcttgcctctgtccacctggtgctgcctctctctgcaacccaccccacctcacccctacaaaattccaagcaaggacaggataaccaaagacttctcacttcaccccccttcacccacgtaacctttatcttagcatcctacccttttcttccatgacatcagtgcaattgtaattacacagctatttgtataattagctgattattaatatctagcctcccccacccctggctagactgtcagcccacaggggcgggggtgggtgtgtgatgtgcactgttttacagcctgactcagtgga

SEQ ID NO: 2235 - DNA, 2700 bp, Homo sapiens
  misc_feature (1)..(2700): DMR16:14859901
aagatcttccctagtagagaagcaacatgctcagaggcctgcataggataggaaggacctgaaaggcagtctgcgcagctggaggaggtgggtgaggtcagggagctctggggccttgtagccttgctttgggattgggctttgctccctaatgcagtggaaacccgttaggagttgtctgttggttggccgggcacggtggctcacgcctatgatctcagcactttgggaggctgaggtgggcggatcatgaggtcaggagttcaagcccagcctggccgcatggtgaaacccggtctgtactaaagatacaaaaggttggcggggcatggtgatgcgcgcctataatcccagcaactcaggaggctgaggcaggagaatcgcttgaacccgggaggcaggggttgcagtgagctgagattgcaccattgcactccagcctgggcgacagggtgagattccgtctcaaaaaaaaaaaaaaaagagttatcagttggcaagggagtgatagggatcatggtactttaaaaagtttgtttttcttcctggctgctgtgtggagaatggattggaggaaagccatggtgtgaatggaggggccagatatgaggcagtggtggttgtctggaggagatatggtagtggccgggcccaggcggctggcaggcgagggagcgaggagtagatggatttggtaggtcacatggagaacacacccacaggcctgtgctgttgaggttacaggtttcttatttgagccactgggtagatggaggcggcgctgttcacggagatggaggaaatatatttattttctcctttaaagtagagtatttgggtcaaagaaagaaaaatagcatttgttgaacatttttggaaaaatctctgttttttaattggccgacgtagtacatttgcctttttagcacactgatacttcttactatttcttttcctttttattttttttttgagacagggtcttactccgttgcccaggctggagtacagtggcgccatctcggctcactgcagcctccgcctctcgggttcaagtgattctcctgccccagcctcctgagtagctgggattacaggctaatttttatattttttagtagagatgtggttttgccgtgttggctaggctggtctcgaactcctgacctcaagtgacccacccgcctcggcttcccaaagtgctgggattacaggctgagccatggtgcctagtcttcctttaaagtaaaataaaaaaattactcaatttattgtaaaaacaaactctttggcttctgtccaaatgactgtgaaaatagatttctctcaatatccaccaatattacctgtttctgtccatatatgtatttaaaccctgttgaaagaatttattgatacaaatcaatttttaagggcttcagtataacggaacctttttctaccacccttttggtttatttttccagactaagccagtatagatttgaggtttagggaaaataggcacttctttttaataagaatgtgggctaaaacagatcttatggttcaaatatttacaacttaaggaggcaaagagatttgataggaaatagacaaggtgatgtgtcctctgacaggtacacaaatcaagagaatatgacaggtccttgggaatgattgtgtcagtgttcgcttcccatccttttattctgaaagttcacagtaggggaatgtgagaaccaaaatgcatatgctaggtcagggactgggacactttctctgtggagagccagagaataactattttaggctgcgtgagccatacggtctctaggacaacagctgagatagacaatttgtaaatgaatgggcagagcgcaacacaactacatttttggacaccacagtttgcatttcatgtaatttttacatgtgaaatattatctttcttttgatttttttttttttaactttaaccacttaagagtgtaaaattctttttctcggcttgcagttcatacacaaacgggaggggggtccttgggtggtagtttgctgacccatgctggagatagtgagctcatatggctgggcagtcccttcactctgaagaaatggctgtgtttttcatgattcctagatttcacatacacaatcttccaccatttccttgtgttttccactgttttttttatttgaggcggagtggtggttccaacatttaatgtacccctaattgtcagaatccaacattcttgattatctttatgtcagaagtaactaatttttatctaaaatgattcttgaagattctttaaaatgaacagttgaaaagacaactgtgacccccagctaggatgtactattacactttaacacaccagctgcttcagaaatgaagaccagcactccaaggatgatggtcgttgtaggggggcctctcgtgtgttattcgagggatgccttgcaacaccttactccttatttagaatctcaaatctgaagcattaccttaatagggcttttcagttataagttacatttgtggctcctacctcccaaggagttcaattttagctttgcattttttaacttaattaccttttctgttccaatctccctgtttgctttcatccatgtattatatataatcacaagcaaggaagacgtctttgataatcctgacttatttgatggcctggtaatgccacagtttct

SEQ ID NO: 2236 - DNA, 2800 bp, Homo sapiens
  misc_feature (1)..(2800): DMR16:14910901
ctgtctctctcttagccaggaaacctggggtagggaggcttggagccagcgggtgcgtcgggaggctgcgggtactgactggggacgcgcacggagattgcgggagaaggatccacgccgcgggagaaggatccatgccgcgggagaaggatcagagtggagcctgtggctgctgcaggaggaggaagccgccgcctggcccacaccacaggagaagggcggagccagatggcaccctgcccaccgcttcccgcccacgcactttagcctgcagaggggcggagcgtgaaaaatacctcgtgcgcctcggccgactctacagtgcgacgggcggagcttccagacgctccgccccacgtcgcatgcgccccgggaaagcgtggggcggagcttccggaggccccgccctgctgccgaccctgtggagcggagggtgaagcctccggatgccagtccctcatcgctggcccggtcgcgctgtggcgaagggggcggagcctgcacccgccccgccccccctcgccccgtccgccctgcgccgcgcggggaggaggaggaggagccgcggcggggcccgcactgcagcgccaacgtccgagcgggcggccgagctcccggagcggcctggccccgagccccgagcgggcgtcgctcagcagcaggtcgcggccgcagccccatccagccccgcgcccgccatgccgtccgccggccccgcctgagccgcggcctccgcgcgcgggcgggcctggggacggcggggccatgcgcgcgctgccctaacgatgccgcccgccgcgcccgcccgcctggcgctggccctgggcctgggcctgtggctcggggcgctggcggggggccccgggcgcggctgcgggccttgcgagcccccctgcctctgcggcctagcgcccggcgccgcctgccgcgtcaactgctcgggccgcgggccgcgggctgcggacgctcggtcccgcgctgcgcatccccgcggacgccacagcgctgtgagtagcgggcccagcggcacccgggagaggccgcgggacgggcgggcgtgggcgcgttccctggcccgggacgggaagcaggacgcgggccaggacgctcccagggcgaggctccggcgcagcacagcggccctgctaaataaggaacgcctggagccgcggttggcacggccccggggagccgaaaaaccccgggtctggagacagacgtcccacccgggggctgtgcagacgccagcgggggcggggcgcggaggccgcgctcagctgggaggacaaacagtcgctaattggagaggaattgggatgcggcctggggctgcggggtacccggagaggtggggatggctgtagggggctgcagggaagagttccaggaggtgtctggacaaggatttgatggatgtgcaagaattgggctgatgcttaggaaggggcgatgaggtgggtccagaagaaggggggtgaacggtgtgagcaaagaccgtgaggctggaggctggccacgggaggtgtgaggggtaggggcagggtgggaggtgggctcgcgggtgggctggggtcatgaagggcctcaggcgctctgctattgggttccaaggctatcctgagaacaggggtgagggcggattgccgtggggggttaaagccttgtcatgttcgctttcgggagataaaaacaacaggtggcctttatggagacgctgcccagagccaggtctgtgccaggctcctgttgggggtcgtcatgcggaatcctgactctgaccatccgaggcatagggaccgtggagatttgcatttcacagatgaggaaacaggtttggagaggtgacacgacctgtcccaggcatcacagccaggacaggacctgtcccaggcatcacagccgggatgtgcatagcaggggtttggaactatgaggtgcccaggacccagggttggattgaaaagggcgcaggggactaagataagcagacagttgtccccagcgctggggagagtcttgggaccagtctgatgccttgtatttcccaggctccaggctcctcgccgggacagtgtctctttgggtgcgtgctggatccctgggggacgtggcacatccccaggcttgctaaacattgggtgggttctggcatttggttttgtaacgtttctgggtcactcccgcctgtggccacccttccttaggggagccgtgtgtccttggggctttgctgggtggtctcgagggtgggagaagaatgggttctcctggaccaatggagcccgtgcccctcggggccacattgctcctgcgctccctgactgcggacgcgtgtgtctcgcggctgtctctgtggagatggcctcctcctgcctggcaacagcacccacagaattgcatcagacctaccccacccgttgtttgtgatgctgtagctgagggctcctctgtctgccaggccggtcactggggactctgtccaggtcctggtggttcctgcttcccagcacctgatggtgtccatgagagcagcccctcgggagctgtccgggagagaagggcgctggtggctgctgagcggagagcaaggcccgtgttctccaggcccttggcacagcagtggagcccccgcccctgccttgtgttgtcctcttaggctctggtcctggggtttggaggagggggaccctgggggttggtggcctgtcccagcctgagctggcaagattccgaatgccaggcccctcaagtgtgcaacagggcacagggtgacctcatgtgggcaggtgggtgctgttct

SEQ ID NO: 2237 - DNA, 1000 bp, Homo sapiens
  misc_feature (1)..(1000): DMR16:15089401
tgaggagatcacacagaagaatcaacagagtgagaaaagagtcaagttttgaagcccaatcaacaccaaatttaagatcaagaaactatcaagaaatactagcgattaaaggatcactggccgggcgtggttactcacgcctctaatcccagcactttgggaggccaaggcgggcggatcacgaggtcagaagatcgagaccatcctggctaacatggtgaaaccccacctctactaaaaatacaaaaaattagctggcggtggtggcgggcgagtgtagtctcagctacttgggaggctgaggcaggagaatcgcttgaacccgggaggcggagcttgcagtgagccaagattgcgccactgcactccagcctgggcgacagagcaaaaaaaaaaaaaaaaaaaaaaaaacagattaaaggatcaggagacaggaggatcagaaacgctgaagttttaagaagtgggtggccaacagtgtcggctgatacaaggaatacaaggcttaaaaaagtaagtccactgaggctgggctcagtggctcacacttgtaatcccagcactttgggaggccaaggcgggcaggtcacctgaggtcaggagttcaagaccagcctggccaacatggtgaaaccccgtttctactaaaaataaaaaaaattaaccaggcatggtggcgggtgcctgtaatctcagctatttgggaggctgaggcaggagaattgcttgaacccaggaggcaaaggttgcagtgagcccagatcacaccactgcactccagcctgcgtggtaagaaggagactttgtcttaaaaaaaaagtccactgaaatcagcatgtaaaaaaaaaacatgggtaacctgtcagggtaattactacagtgataagaacagtggacttaaatgtgagtgagaaatgatacagcgcagtcagctggaacaaaaacaacagatgacaattattgcccttactttgagtcagagactgttctaagtgcttct

SEQ ID NO: 2238 - DNA, 800 bp, Homo sapiens
  misc_feature (1)..(800): DMR16:15294001
tcgtgaggtcaagcgattctcctacctcagcttcctgagtagctgggattacaggcacgtgccacgatgctcggctaatatttgttttccttttttttttttttttttgagacggagtttcgctctttttgcccaggctggagtgcaatggtgcaatctcagctcactgcaacctcctgccttccgggttcattcgattctcctgtctcagcttcccgagtaactgggattacaggtgcatgccaccacacctggcctaatgtttgtatttttagtagagacagggtttcaccatgttggccaggctgatctcgaatgctgaacctcatgatctgcccacctcagcctcccaaagtgctgggattacaagcgtgagccaccgcgcccggcccatgagcatgtttcttgacctcagtttccccttctgtaaagcatggtgtggattgttcacctcgcatgggcatgtgaatatcaaatgagacatcctgtgcaatgtgcctcagacaaagaaaggagatcagcaaataatatttcctttctagttcatcctctcttcccatgtatgccaagaaagcaggcgagattgagtgagggaggtcatatcctctttgtctaaatgttttcttgttagagaacatctttcttcttaacatcccttcctacataaagaatctctgtcagaggaatattaaaaggccctaacctacagttagatggaaggcgagactccgatctcacagctgaatcactttagtctacctctctacccatctaatgctacccccttcaaaaataataat

SEQ ID NO: 2239 - DNA, 700 bp, Homo sapiens
  misc_feature (1)..(700): DMR16:15372401
cttgaagccaggaggtggaggttgcagtgagccgagatcacaccattatactccagcctgggcaacagagggagactcctcttgggggtgagaaaagaaaaaaaaaaaaagcttcctccaatttataccaaaaattctctgttcaggactaagtggcatagagaatgttaaatgtgcctagatatcttcataactcatatattttctgttttctacatatcttgaaaggcagtgccaaatgacgtgtaattatctaggcagtaaaactgaaacatacttcctcttcccttgaatatcaaaaagcattgtggtattagtacttttatcttggatcattgttcagaaggaggttcagcccccagacaaccacatttttactgtcatgaatggcaagacaaaatgtagagctcaacttacccaaaggaaaaaaggctcaaaagacaaattatggcacaacttagcagccaaattcttaccaagtacagacttttgacatacggatctctctccagttgcaagtgggaacatgcactttgaatgatgtcattcaaaattaccctgcccagacacacttttcattgattctcttggagggcagttctaagagattctctggggctttctctgcatcatgagacgcagtgcagttctgcccttcaccttccggcagtttgtcacctcgtccctatgacctcagagg

SEQ ID NO: 2240 - DNA, 100 bp, Homo sapiens
  misc_feature (1)..(100): DMR16:15571001
ggcagccttctttactaatgctgttttatcaggaaggtctttgtgacctgtatcttgtgccgacctcctatctcatcttgtgacttagaatgcctaacct

SEQ ID NO: 2241 - DNA, 2000 bp, Homo sapiens
  misc_feature (1)..(2000): DMR16:16451801
tacatagctggagtaggaggaagagagcaaaggggaaagtgctacacacttttaaacaaccagatcttgtgagaactcactcactgtcatgagaacagcaaggggcaagtctgtccccgtgatccaatccccttcccccaggcccctcctccaacactggggattacgattcaacacgagatttgggcggggacacaaatccgaaccatatcaggctgcaataacaaaatagtataaactggatggcttaagcaacagaaatctatttctcacagttttggaggctgagaagtgccacaatctggctgatgtagctcccagcggaccctcctcctggcttgcagaaagctgctttctctctgcattctcacatgacggaggaagtggggggtggggggagcggaggtagagagggagagagagagggagggagggaagaggagagacagagcaagagagcaagccgtctggtgtcttttcttgtaaggatgctaattccatcacgaagacctcatcctcatgatctcatctaaactaatagtcttccaaaaaagcccacctcctaataccaacataatggaagttaaggcttcaacatatcaattttgaggggacacagttcagtccattggacttagagttcacacttcctggacaagattttggaacgttgtaaagctttcttcagaaaaacaactagtttattttcccccaagcatttatagcccactttagcagcactcaactgcatgcctctgatctatatgctaattttggatccgccttatctcttaagtaatccaagagtttgtgtgtgtgtggatgctccttgatttgaaatccttatgtgcttagaactaatggcgttgtaaaacacactccacaatgtacccttctctaattcagcctgattttctcccatccctccacgttagccgggctcccatgcccctgtttttgatcacgattgattgtccagctccaaagcatcatctgaacgacttatggtctttctcccgagtgttggagcccagggtaggcagatgggagagggtaggggatttgaaccggagaaagacatttaaatttcctcctgttcatcttagcttaggaagttacctgctgtctgaagggtgtatccctattttattatttatttatttttacaaaaccaagggaaaccagcaacgaaacgcaagaggagctcctctgcctctgattccagtagctgtgctctcaggttggagcagccaacccagaaattggtggccagtggctagggtcaggatgagcagagtgaacgcgagttctatgtctgattataaaaactgtacttgctccttatggagaatttgaaatctagggaaattataaaaatgtaaagtgttatcagtcctttgtcagccattgggctggttggttggtcagaagtcatcactgttatagaccctcattgcttaatgaaaattaatttgtcaagcgatttccttgatgatgctaatatttattgaaaggttaccctaggctgagttctggctaacagctatatatatgtatacttttattttccaagtgaagaaacaggctcagagagggtaagaacttactcacagtcacacagcaactgagtggggcggctagaatttgggttcagatagtcagacgttagagttcaggtttttcatcccttcaacatctacacatttttcaagaaataacaagattcacttttggtttgaagaggagtgcatgggagagaaagaaaagtaccaaatgggaaaaagagagagcaaggaaaccaaactccgtttgtggtcgtgagctacattaaaaaaaaaaaaaaaaaaaaaaagccaggccagggacaatggctggattatgcctgtaatcctgccactttgggaggccaaggcaggaggatcacttgaggtcagaagtttgagaccagcctgggtaatatagcgagaccccatctctacaattcttttctttttcttttt

SEQ ID NO: 2242 - DNA, 600 bp, Homo sapiens
  misc_feature (1)..(600): DMR16:17124401
cgtggctggtaactgttttgtttaaggaggctaaagacaggacccttctggcttgtagtgtttctgctgtgagaaatctgctgttaatctgatgggttttcctttataggttacctgatgcttttgcctcttaaggttatttcctttgtcttgactttagataacttgatgactatgtgcctaggcatgatctttttgcaatgaatttcccaggtgttctttgaacttcttgtatttagatgtctagatctctagcaaggctggggaagttttcctcaattattccattattcaaacttttagatttctcttcttcctcaggaacgccaattattcttaagtttggttgtttaacatactcccaaacttcgtgaaggctttgttcattttttaaaaattcttttttgtgtttgttggagtgagttaatttgaaagccttgtcttcaagttctgaagttctttcttttactcgtttgattcgattgctgagactttccagtgcattttgcaattttgtaagtgtgtccttcattttcagaagttgtgattgtgttctatttaggctatatttcactggagatttttccattcgtatcctat

SEQ ID NO: 2243 - DNA, 2200 bp, Homo sapiens
  misc_feature (1)..(2200): DMR16:17322801
agtgtttggtgaccatcagtctcctcctatagactatagactccatgcagacaggaactgtctctgccttgtgcagtgctgtatctccaggcccctggcatgatgtttggcacaaagggggtgcttgatgaaagcttgtggctgaatgcatgaaacagagaacctaaaggcaaaacagcagctggtgccaatccggtccatttcctcatccccagagagggacagggccatctggcaggtcctagccaaatacctccatggcaggtcagggctgcagagctctccaggcaagctggccatggaggccataaaccaactcctcaaagccatctctgcttcatggtggctggtctttatcattttccaatcaacactggttgagttctaattgattttctatgatatccctctccagaagggagaaaggctctgtttactggggcagtacgtagaggacaggcctattcttcctgctgtatttaatgctgctgctaatcacggagattagactaaaacaattacaacagctaattaaagaacaatgcggtttttggcatcttcgcgcagacggcaccattgggaattcctaactcgggcaaagcagggataattaaaaccccggctccactctccccactccagcagctggatcacgctgattaaactgcaaataaaacacatgaaaccaacactttgtagtctatccaatttcacttaaaagggcttttaactgattcataaacagagaagcggtaaacagcaaattatttaactaaagccagttatttcgtcatcacggttcactttattcccagctccggacttgtacatgtagcccaggggacattaggttgatggggcctgaggaatcactccagagcttactgccacttgctcctgttcactggcaacaggacatcaccagtgtgtagctgctttctctgggttttttctccttttgaaaaaaaaagatcaggtagtgcccaagtccccagatgaatatgcccaggtctgatcagactctgctctcgattctaggtcaagagcagatggcagagacacagaaagttccgaagcgcagataatactaaaagcatcatatgtagctttaaaacatttaacttattcagagctggccaacttcagatctaaaatgcaacccgtatctactaaagtatgaaacagacttgttctcaagctatgggaagacatgtcacaacagctgggtagaaagctcatttgttttagacaggcacactctgagaccccagctcaggtcccatgcacacatgcttcccaactcatcttaacaagcatggtcatggggattgctaattctctctccaccttgccaatccagagacaacaagggaaaaaagtgagaaataaaaagaaaaaggtcaagggaaaaagaaaaggacagaagagaaaagggagaaaatggtaacgctagagacaggctcactgggagcagcaagaagggacagaaaaagaaaaaaataccacaagaaagcagacacagggattttcagagcccagcatgacacatgcggtgaggacctaggagccagcgcctgtccctttgcagtggccaggtatgatggtcacgttccacagcagtgcttctcaaaccagctgtggagaaaggcctttgtatgcccagtctactgcagggtgctaattttgtaaaataaaacaaaaaaagaagcattaaaaataaaagattgacttgcttaggtgccatgccatgtccggttactataaaagctgctgaaagcttgtccttcgtttctgagcgcgtcttcgtgcacacagtgagaaaccctggggatggcactggtccatggaccgacaacgctctgagtagtcctttttgaaaagatcccccacggtcattgggaataaacataatcagattcataggattctatttaatgtgcaccacatgtttttagtgaacaaatgcaggctttcagacacacataaatgtagaaaacaaagaccggaaagacatgcatcaaagattttatttcggaataatgatttcaccgatctttcttctctttttttcaagctttgttataaaatactcatgaaagttatttttaaatgaatattccatttatgaaggcaaagaaagacgatgctttatcataacacgagttatagctatttatatataattatggatgttatttat

SEQ ID NO: 2244 - DNA, 2000 bp, Homo sapiens
  misc_feature (1)..(2000): DMR16:18323801
agcaaagccccatctcaggaaaaaaaaaaaaaaaaaaaaaaaaaaaaagagaaaggaaaaccaatgccagtactagcaactcctcttcccctgaaaaaatgacaaacaagaatgtaggaagggaaaggaattatacagcttaaactaatgaagcagaaaggacaaactcaattttgaacccactgaatttgccacaaatattgtagaaaatattctcaaggactttacagttgtctactttgattggcacatggttcatacaacagtatttgtgtcaaggcacatcttactgttctttggcggtcttcctctttccattgattttgtcatgacggttgacttttgttgtcaccttcatcttacggattttagctcgaactttggtttccacctgtctccataaagtaaagatgtcttccaggacaattttaattcctggaaaggaagaaactcttttctttgtgtgcatacaaatggacttcagcccttggtgagagtgaggagaggagaaggtgagaaacctgagggcaagaagctgttctttccctttccagggcaaactcatttccacactatggggactccaacagagccataccttcctgtctacggcggttggacctcctggctctctgctgtacatccgtggatccatcatgtccattttgagatgggaagatagtcttcaggaaagacacctaggaaataataatataagaatgacggctgggcacggtggctcatgcgtataatcccagtactttgggaggccgaggcaggtggatcacggggtcaggagttgaagaccagcctggccaagatggtgaaaccccgtctctactaaaaatacaaaaattagccgggcatggcagtgggcgcctgtaatccgagctactcgggaggctgaggcagagaaccgtttgaagctgggaggcggagtttgcagtgagccgagatcacaccactgcactccagcctgagcgacagaatgagactctgtcacacacacacacacacacacacacacacacacacacacaaagaatgacatgaggctggcagggtggctcactcctgtaatcccagtactttgggaggccgaggcaggcggataacctgaggtcgggagtttgagaccagcctcaccaacatggagaaacgctgtctctgctaaaaattcaaaattagccaggcatggtggtgcatgcctgtaatcccagctagtcgcgaggctgaggcaggagaatcacttgaatccagcaggaaaaggttgtggtgagctgagattgtgccattgcactccaacctgggcaacaaaattcaaactctgtctcaaaaaaaaaaaaaaaaaataggccaggtgctgtagctcacgcctgtaatcccagcactttgggaggccgaggcgggtgaatcacaaggtcaagagatggagatcatcctgggcaacatggtgaaaccccgtctctactaaaaatacaaaaattagctgagcatggtggcccacgcctgtagtcccagctactcgggaggctgaggcaggagaactgcttgaacccaggaggcagagggtgcagtgagccaagatcccaccactgcactccagcctggtgacagagtgagactctgtctcaaaaaaaaaaaaaaaaaaaaatgacatgaatatacttcacacaactgaactgtacacttcaacacggttagatggtaattatcatcttgtaagtattttaccacaggttaacatgtttcacaacttgaaaaggaagtaattaattaccttcagctctctgagttctagaatttgtaacatttcaccccctgctccttcctgatctgcactggagcatctttcttctgtccctgctctactcagagttcactttcccttccctcacatcagcttcgttgaggctggtttgaacttaacgcaaaacattctcactaatgactgaattcccaccaagatttccatattatcacagtatgcttttaatctt

SEQ ID NO: 2245 - DNA, 5800 bp, Homo sapiens
  misc_feature (1)..(5800): DMR16:18398601
ggttgcggcgagctgagatcatgccactgcactgcggcctggagacaagagcaagactccgtctcaaaaaaaaaaaaaaaaaaaaaaaaaaagacatcaactaattgcagtgtgtggaccttatttggctcttaattcaaactattaaaccaaaaatgtgaacacaccaggccttcggtggcatgaaggaattgtctgttgtgttaggtgggtctgcggtattgcgatgccctccaaaatgcttgcagataaaagggtggctggaatttggttcaaaacatgggtcagggctgggcgtggtggctcatgcctgtaatcccagcactttgggaggccgaggcgggcggatcatctgaggtcaggagttcaagaccagcctgaccaatatggagaaaccctgtctctactaaaaatacaaaattagccaggcatggtggtgcacgcctgtaatcccagctactcgggaggctgaggcaggaaaagcgcttgaacccaggaggcggaggttgccatgagccgagatcgtgccattgcactccagccttggcaacaagagtgaactctgtctcaaaaaaaaaaacaaaaaacacatgggtcaggaggggaagggtcggggcagggagggcagggcaggctctggggtggggggtctgtgagtcagccacggctctgcccacgtctccccacgaagcttcgagccatgcagagcagcacgttttgcagtacgccatcttttccaaaagccaccacctctcggcagcatccttaacccaaggcaggctgtggcctcagaagccccggctgtcctccacctggaactggacacagctgtccctgctgagcttcagcagccagggagccacaagtggagaggcacctgcgtgagccccccaggaaggctactggtgacacccagacagcaacgctcctggacccttgaacacctgccagcagctgtgatctgtgtccttcacctctcccagcttgacccctcttccctggggaaaacccagccgtctccccgaggaggagtttgcagggtagacagcaaaatggctgggctgccccacagcacagagggtggcctggggggccagccagggccttcacatccttcctagggccctagtttcccatgggtcccctcaccccaccttccagaactctcccagcggcggccccaggtgtgtacagaacagcacccacctgcccacgaggtcaccctgtgccctgttgcacacttgaggggcctggcattcggaatcttgccagctcaggctgggacaggccaccaacccccagggtccccctcctccaaaccccaggaccagagcctaagaggacaacacaaggcaggggcgggggttccactgctgtgccaagggcctggagaacacgggccttgctctccgctcagcagccaccagcgcccttctctcccggacagctcccgaggggctgctctcatggacaccatcaggtgctgggaagcaggaaccaccaggacctggacagagtccccagtgaccggcctggcagacagaggagccctcagctacagcatcacaaacaacgggtggggtaggtctgatgcaattctgtgggtgctgttgccaggcaggaggaggccatctccacagagacagccgcgagacacacgcgtccgcagtcagggagcgcaggagcaatgtggccccgaggggcacgggctccattggtccaggagaacccattcttctcccaccctcgagaccacccagcaaagccccaaggacacacggctcccctaaggaagggtggccacaggcgggagtgacccagaaacgttacaaaaccaaatgccagaacccatccaatgtttagaaagcctggggatgtgccacgtcccccagggatccagcacgcacccaaagagacactgtcccggcgaggagcctggagcctgggaaatacaaggcatcagactggtaccaagactctccccagcgctggggacaactgtctgcttatcttagtcccctgcgcccttttcaatccaaccctgggtcctgggcacctcatagttccaaacccctgctatgcacatcccggctgtgatgcctgggacaggtcctgtcctggctgtgatgcctgggacaggtcgtgtcacctctccaaacctgtttcctcatctgtgaaatgcaaatctccacggtccctatgcctcggatggtcagagtcaggattccgcatgacgacccccaacaggagcctggcacagacctggctctgggcagcgtctccataaaggccacctgttgtttttatctcccgaaagcgaacatgacaaggctttaaccccccacggcaatccgccctcacccctgttctcaggatagccttggaacccaatagcagagcgcctgaggcccttcatgaccccagcccacccgcgagcccacctcccaccctgcccctacccctcacacctcccgtggccagcctccagcctcacggtctttgctcacaccgttcaccccccttcttctggacccacctcatcgccccttcctaagcatcagcccaattcttgcacatccatcaaatccttgtccagacacctcctggaactcttccctgcagccccctacagccatccccatctctccgggtaccccgcagccccaggccgaatcccaattcctctccaattagcgactgtttgtcctcccagctgagcgcggcctccgcgccccgcccccgctggcgtccgcagagcccccgggtgggacgtctgtctccagacccggggtttttcggctccccggggccgtgccaaccgcggctccaggcgttccttatttagcagggccgctgtgccgcgccggagcctcgccctgggagcgtcctggcccgcgtcctgcttcccgtcccgggccagggaacgcgcccacgcccgcccgtcccgcggcctctcccgggtgccgctgggcccgctactcacagcgctgtggcgtccgcggggatgcgcagcgcgggaccgagcgtccgcagcccgcggcccgcggcccgagcagttgacgcggcaggcggcgccgggcgctaggccgcagaggcaggggggctcgcaaggcccgcagccgcgcccggggccccccgccagcgccccgagccacaggcccaggcccagggccagcgccaggcgggcgggcgcggcgggcggcatcgttagggcagcgcgcgcatggccccgccgtccccaggcccgcccgcgcgcggaggccgcggctcaggcggggccggcggacggcatggcgggcgcggggctggatggggctgcggccgcgacctgctgctgagcgacgcccgctcggggctcggggccaggccgctccgggagctcggccgcccgctcggacgttggcgctgcagtgcgggccccgccgcggctcctcctcctcctccccgcgcggcgcagggcggacggggcgagggggggcggggcgggtgcaggctccgcccccttcgccacagcgcgaccgggccagcgatgagggactggcatccggaggcttcaccctccgctccacagggtcggcagcagggcggggcctccggaagctccgccccacgctttcccggggcgcatgcgacgtggggcggagcgtctggaagctccgcccgtcgcactgtagagtcggccgaggcgcacgaggtatttttcacgctccgcccctctgcaggctaaagtgcgtgggcgggaagcggtgggcagggtgccatctggctccgcccttctcctgtggtgtgggccaggcggcggcttcctcctcctgcagcagccacaggctccactctgatccttctcccgcggcatggatccttctcccgcggcgtggatccttctcccgcaatctccgtgcgcgtccccagtcagtacccgcagcctcccgacgcacccgctggctccaagcctccctaccccaggtttcctggctaagagagagacagagggagagagggggaagagagagaacaggcaatgggaggttgatggtgagagcttattgaaagacaagagggaggaaacccacatccttcattccccatccattcatttattgccttatttattccattgaatcttcacagctctagaaaaagtgtgctacaattattccctttattaaatgaggtcactgaggcacagtttaagaaatttgccagcagggcacagtgggtcactccggtaatcccagaactttgagagggggaggaaggtggatcccttgagcccaggagttggagaccagcctggccaacatggcgagaccccgtttctacaaaaattagccaaaattagccaaactggctcacacttgtagtcccaggtactcgagaggctgaggccggaggagcgtgtgagcccaggaggcagtggctgcgctgagccgtgattgtgccactgcactccagcctgggcaacagagtaagaccctgtctcgaaaaaaaaaaaatggaaaaaagaaaaaaagaactggctgggagtggtggctcatgcctgtaatcccagcactttgggaggccgaggtgggtggatcacctgaggtcaggagtttgagaccaacctgaccaacaaggtgaaatcccatttctactaaaaatacaaaaattagccaggcgtggtggcaggtgcctgtagtcccagctactagggaggctgagacaggagaatagcttgaacctgggaggcagaggttgcagtgagccgagattgcaccactgcactccagactgggcaatacagtgagactccgtctcaaaaaaacaaaaaaaatcctaccacatgtgctccaccaagctctgtctccaaggtggccttggaagccacatggggaaggtggcagagactctaggagcctgagcagaaatccagatgattatgaaaaatgcagacctacccatccttattcacctgggaccaccgtgaactatatcataagaaataaacccctattgtacatacatgcaccattcgagttgggtctatttgttacagcagtttagccaaccctaatccacatatacagtgtcaacagtggctgagatgacatgttgcacagacatgagagtcagaaagacctgagttcaagtcccagtgatgacatttactatctgtgtgaccttgaaaagctgcctaactactctcagaccgtttcctcatcagtttgttttgagagtcaaatgagaaaattactaaaaagcccttagcactgcatctaagatggggaagagacagtcaatgaattcaagtttcctgaagcccagttgcatccctgccctgccctgggctctgagagacagttgccgaagctagtgttaaagtgaactaaatatggcctgagtgggacttcgtacttctatagttgagtccttgtggacaaattgcaacctagcttaataggtagacaagattgaaaacctaacttaggagtatgcgcctgtaacaatagctgagtcttggccaatcccagaggccgtagttcaaccgctcatacgctgctgagtgttcaaactgtactcaaataaggcaaacgccaacttgtaacaatccagccattctgtacttcacttctgatttctgtacatcatttcccttcttttgtccataaatcttcttccaccacgtggctgcgctggagtctctatgaatctgctgtgattctggggtctgcccaattcgcgaatcattcattgctcaattaaactactttaaatttaattcagctgagattttcttttatcactaatttgagctggt

SEQ ID NO: 2246 - DNA, 200 bp, Homo sapiens
  misc_feature (1)..(200): DMR16:18601501
ggtgcagatttcttaaccgcatacatttcattatgatgagatctaggtttctactgtatccatcacccaaacagcgaacattgtacccaagaggtaatttttcaaccctcactcccctcctaccttcccaccttttgtagtctccagtgtctgttattttactctgtatgtctgtgtgtacccattgtttagctcccact

SEQ ID NO: 2247 - DNA, 1500 bp, Homo sapiens
  misc_feature (1)..(1500): DMR16:18653401
aaacctctttacaaagccagtggtcaaagagtagaaccgtctttttcaacagcaatcagtgaagatgatcatgtcactctcctgtggccaaccctcccctggcttctgatcgcactaggaatgaagtgcaaactcttctcccaggatctcaccaggtcagcacagcctggcctcacgtgtctcttcaccatctcagaccattctcctgtcttgctccactccaactgcattcatctctgtgttcccaggcacgtgccaccacacctggctaatttttttttttttttcttggtggaaacagattctcaacatgctgctcaggctgatctcaaattcctggtctcaagtgatcctcctgcctcagcctcccaaagtgcaaggattaaaggcatgagccactgtgcccagctgcattttattttatttgattttattattattattatttttgagatggagtttcactcttgttgcccatgctgtggtacaatctcggctcaccacaacctccacctcccgagttcaagtgattctcctgcctcagcctcctgagtagctgggattacaggcatgcgccaccacacccggctaattttttatttttaatagagacagggtttctccatgttggtcaggctggtctcaaacttccaatctcaggtgatctgcccacctcggcctcccaaaatgctgagattataggcatgagccgccatgcccagcctgcatttcatttttctaagacaaaaatattctggagatggatggtggtgatggttgcccaacaatatgaatgcacttaataccactgaactgtacgcttaaaagtggttccaatggtaaatattatattatttgtgttttaccacaataaaaatgtgttttaaaaaaggaagaaattctgaaacatgttacaacatggatgaaacttaaagatattatgctgagtgaaataagccagttacaaaaagacaaatatcatatgattccacttatatgaggtatctagagcagctgaattcatagagaaagagaatagaacagtggttgcccagggatggggaaatggaggcatagggaattggtgtttaataaggacagagtttcagtttgagatgatgagaagcgtctgaagatggatggtggtgatggttgcccaacaatgtgaatgtacttaatgccacttaattgtacacttaaaattgtacacttcaaaatggttaaaatgggcctggcgcagtggctcacgcctgtaatgccagcactttgggaggccgaggtggacggatcatgaggtcaggagattgtgaccatcctggccaacatgctgaaaccccgtctctactaaaaatacaaaaattagctgggcatggtggcgcatgcctgtaatccaagctactcaggaggctgaggcaggagaattgcttgaaaccgggaggtggagtttgcagtgagtcaagatggcaccactgcactccagcctggcaacagagtgagact

SEQ ID NO: 2248 - DNA, 2200 bp, Homo sapiens
  misc_feature (1)..(2200): DMR16:19184001
gcccagaggaggaccctgctcctgaccgtggtggattttgataagttctcccgccactgtgtcattgggaaagtttctgtgcctttgtgtgaagttgacctggtcaagggcgggcactggtggaaggcgctgattcccagttctcaggtaagggatgggtttgtggtgtttcctcctgggagcttttttaaaaagtgattatttttattttattttactgtttaaaaggcttttttggatttttaaaactttttattttgaaataatttttgactcacaagaggttgcaaaaatagcagagagttcctgtgtcctcttgatccagcatgatagcatcttacgcaaccaggaaatagatgttggtaactaacctagagcttactcagatttcagtagtttttttttttttttgagacgctctgtcacccaggctggagcgccgtggcgtgatcttggctcactgcaaactccacctcccaggttcacgccattctcctgcctcagcctcctgagtagctgggactataggcgcccgccaccacgccctgctaatttttttgtattttttttttttttagtagagatgaggttttccgtgttatccaggatggtctcgatctcctgacctcaagatttcactactttttacatgcatcactcatgtgtgtgtctttctgtgaaaatttatcacatgtatagattcctgtaaccaccaccactctggaagccttttttaaatcatcgatgctgagttatttaataaggagaatgattgcacagggtataaagctatcaatcattttgactttcagaaattgatttttttggggaaaaagtgaaggctggaaaacaggatgatgcatggatgtttttcaggccaactgttagattggcttccttccccctgtccagcccagggaaatgtggttggctgctcgggaagccacccacggaccaggctgtgtctccagtcggctgttgtgcattcctgcatattagagggtaactgtctacccattgtaggtagaaggatgtggggagcccaaggaaaggaaaagacccagccactccttcctccttccctcccttcccgcttctctcttcactccctccctcccttccttccctgctaccctcttccctccctttctccctccttcccctccttcctccctcccctcctcccctcttcccttccttctctccctgtcctgtgggatggctgttgtaggaacagggacgggagatggagaaacaggggagggggctttggccaccatgaggtcaataagagctgccttccaggccaggcgcagtggcttacgcctgtaatcccagcactttgggaggctgaggcaggagaatcacttgagtctaggcgttcaagaccagcctgggcaacacagtgagaccccgtctctacaaaaaacaatttaaaaattagctaggcatggtagtgcacatctgtaattctagctacttgggaggctgaggcaggaggatctcttgagcccagagtttgaggctgcagtgagctatgatcgagccactgcactcactccagctcactccagcctggttgacagagtgagaccctgtctctttaaaaaaaaaaaaaagttgcctttccatggggagccatttggtgacgtgcagagaaaatggccttgggtccaagctgcaaccttcctcccagtgcctagctgttgctgggcccctgtgctccctcacctcacttcaggtgaagtggaggtagtaacaccacctcgcagcgagggcctggcgggtggcgagcactccacagtggcaggcccagttgtcaggagacgacgtcttctattgtgaacccattcagagtgagcctgtaatgtgtcgccttccagtgcactaagcggtaatcacacctggtgaatatctaattgggcagacaagaggcggggagtgttcccgttcactcctgatgctgagccttcttgcggtagaggagctggcgtctcctcagctgagttaatctcggggctgccatctcctttccatttgaagagggacagccgggcctgtttcaggtcactgcgggagcaggtttctcccagacaagggctggctcctcacccttgatagagctgcaggccgtgccttagtttcatggggacctttcagtgcctctatgaattaaaagtattcatgtgtatagggctga

SEQ ID NO: 2249 - DNA, 600 bp, Homo sapiens
  misc_feature (1)..(600): DMR16:19307101
aaacagatggaaagtgactcccatccactggcaaagtgtagtagttaggggtcttgggtacttgactcagatagacctgggtttgattcccagcactaatgctttatttgctgtgtgaatttgggtagaccaatctgagtctcagttttcttatctgtaaaatggggctgatgacgcctgcttttcagaatggtgaggataaaatgagtaaagttcctggcatggcacataataagccctcaacaaatggcagctagtaatagtagtaataatagcagtcagattggtagcagtagtgccagatagcagtagcctcaatgaagacatctgtgcagaggtgttagaaattaagttgctaagacgtctgagctggagctgcctggctcaaatgcctgatcttcttcttggcttgcttctttgtctctttgggtggaaccctcccaggaagggcagtttgaatggactgatggctcatcctatgactacagctactgggatggcagccagccagatgatggcgtccacgcggacccagaagaagaggactgcgtgcagatatggtacaggcctaccagtggtgggtacccctgagaccaaggc

SEQ ID NO: 2250 - DNA, 3100 bp, Homo sapiens
  misc_feature (1)..(3100): DMR16:20876301
tagatgtttctcaaaaggagacatgaaaatagccagcaggtatacgaaaaaatgctcaacatcactaatcatcacagaaatgtaaataaaagccacaacgaaatattatctcaccccagttaaaatggttatgaaaaaaaaaaaaaacagaataatgaatggcaaggatgtggaaaaatgggaaccctcgtatactgttggtggaaatgttaatgagtatagccactatggaaaacagtataaagggccctcaaaaaactgaaaatagaactactgtatgatccagcaattgcactactaggtatatgtgcaaaggaaagaaaatcaatatactggagagatctgcactcccatgtttattgtagcattattcacaatagccaaaatatggaatccacctgagtgcccatccatggatgaatggataaagaaaatgtggtacatatacacaatggaatattattcagccataaaaaagtatgaaaccctgtcataggcaacacggttggaactagaggtcattacgttaagtgaaataaaccaagcacagaaagacaaatagcacatgttctcactcatgtgtgagctaaaaaagtggatctcaggaagagagagacagttatcttctctaggtagttaccagaggcagggaaggggagcgggaggggagatgaaaagaagtgggttagtgggtacaaacagaagtaagacctagcgttggaaaaatcagtagggtgactccagtcaacaataatctaatgtacatttcaaaataggtggaagagaataatttaaatgatcccggcataaagaaaagataaatatttaaggtgatataatatcccaattaccctgatttgatttttacacataatgtgaatgtatcatattatcacatgtctcaaaactacatatattatttatcaattaacaaaaaaatgggactgagttctgcgatgaaaaaaaaaaggtcacggtgaagaataaatggctgcttcatatgagatgggtctcagttcacgtgctgacatgtgttccatgttcaaccaatccaaatgccacttccctctaattcagcacaacgctgttttacttcttcacggcacttacaactctgtgaaattctaatttgctgacttatttattgcctgctccctctaatagcaggcattttacctgccttattcgccactttaccctgtgcacctaggctatgtggcacatggcacattgataagtatctgtagaaggaataatagtcactgatactgagcacatgctctgtacaaggctttattgctttaaatatattaactcgtgattgaataaatgctgaatctgagatgtttagcactttctcacacacaattaatactcaataaatggtagctatttataccaattcaaattataggatgatgtcaacaaacactcaacaggaaagagtaaagggagttgagtcctaagaatgcagaactcaattcagttctcaagagctgattttttctttttagagacaggatctggctctgttgccagcccagagtgcagtggtgcaatcataactcactgttaacttcaaacttctgggcttaaacgatcctcccaccttagcctcccaaagcagctaagactacaggcacatggtgccacacccagctacttttttcatttttatttttgtacagacagggtcttgctatgttgcccaggctggtctcgaactcctgggctcaagcaatccttctgcctcagtctcccaaagcacttggtttatgggtgtgagcactgggcccagccctgattcttaaggtctattttttcttggactccccccattcgaagcacccactaccttcagagaggaaagagaggagaggattatcttattactccaattattctttaccttatgagtttctcagataatgtgatacaaacacagcttctcagccagcagtacacaggtccatctctcctcacttcacaagctaattttcacctcaaatacagcaaaagccagaatatgaagctgacatagggagatgttcaacctgtcatgtctctttttgacctgtacctcaggatcttagaaaaaattcacattaatggaaatcacttctgcctctcttttcagtcagggtgttatgtccaagggtttactgaagccacagccatgcactgcactctaggaagaccaaggggctcaccaactgggaacactccagtgaaaagcctcaggctgctggtctgaactgcatcttccccacctcaacaaataaaggcatcatatttaaggtgtctagagatgcaggagcaacagccagcagcttttttgaatactgcatactacttgctttaaatacgaattcaactgcttaaaacacaaggactcatggccagtgttacacctcttgagatgttataccactgttcacttgatgacagagtgacttttaacttggagggctgaagcacataccttatcaaagagggtaagtgatacagacaataaaggtcctccatctctttacagccaccagagacaatgaactttgtttcacatgactgcgagaaaggccaacaactaaagtcctcaacggggcccccaaagccagaggtacttgctgagaaagcaaagggcagattccacctccgctggctggcagacccacacattctgcttaaccatgtgaaacagccagctcttactctgcccgcccccaggcccagttatgatatttggggtagaaagagaatagcaacaccggtgacttttctaggaggctgttttataaaaacagagcttccaattttaggcctaaaattgaaaagaaaaatagccagaattagaagtctgttttaacacaatatattgaaaattacaagtttaaacactggtagctggagacggggtatcacactaccacatgacttctcagtgagtcataaaaaatagtaccggcttgtttaacagtgatcgtccaccagtgacagaattaagaagtccgcttgtgtcaaatgatggaaaaccaaactgatacccctcttgtgtttgtttcagcagtggcagaactgacacaaatgaattgcagcaaca

SEQ ID NO: 2251 - DNA, 200 bp, Homo sapiens
  misc_feature (1)..(200): DMR16:21231701
ttagtctgatatagaacattatgatgatgtctgaaatcttcccttatgattgtggttttgtttttttttttctgtttaatttttgctttcccttttttgcagctgtgttatttaatttatacaagtttaaaacgatcatagtttcttgattaattgttcctttcattatcatgtattatctctctttatgcctagtaaat

SEQ ID NO: 2252 - DNA, 1200 bp, Homo sapiens
  misc_feature (1)..(1200): DMR16:21465801
taacatggtgaaaccccgtctctactaaaaatacaattgtgccactgcactccagcctgggcaaaagagcgagactccgtctcaaaaaaaaaaaaaaaaaaaaaaaaaaaaaattaaaggaggccaggcatgattgctcacacctgtaatcccagcactttgggagggcaaggcaggaggattacttgagaccaagaatttaaggccagcctagacaatgtagcgagaccccttctctccaaaaaatataaaggttagccaggcatggtggcatgcatctgtagtcccagatagtcgggaggctgagtgggaggatcacttgagcccaggagtttgaggctgcagtgagctctgattgtaccgctgcactccagccaggggaatacagcaagatcctgtgaccaaaaaaaaaagaaagaaaagaaaagaaaaaaagaaagaatctggtgcgtagagcaatgtttcctcagaaaaaacgagtaaagctacaatgagactagctatcaaccactaaaaatagaggcctggcagagtggctcatgcctataatcccagtactttgggaggccaaggcaggtggattgcttgagcccaagaattcaagaccagcctgggcaacatggcaaaactccatctctacaaaataatataaaaaattagccaggtgtggtggtgcacgcctgtagtcctagctacctggggggctgaggtgggaggatcacctgaacccaagaggtcaaggctacagtgagccaaaatcatgccactgcacttcatcctgtgcaacggagtgagaccctgtctcaaaaaaaaaattgcattaaaaataaaagtaaatagacactaaaatgaaagcacagattataagactgatgaatgtactctaaaaaaattatataataaagcaaagcccttattttttttcttttttggagacaggtccttttttgtcaccttggctgagtgcagtggcacaatcagagctcacttcaacctcaagttcctgggcttaatcgatcctcctccatcagcctcccgagtagctaggactgcaggtgcacaccactacaccaagctaatttttgactttttgtacagatggggtctcactacattgcccaagctgtgccagaattcctggatgcaagcaacccttctgctttggcctcccaaagcgctgggattacaagcatgagccac

SEQ ID NO: 2253 - DNA, 300 bp, Homo sapiens
  misc_feature (1)..(300): DMR16:21492901
tcacagacaaacctgttgaaaaatttatcttccttgccttcatttactttttaacccactttaatctgggttccacctgcaacacaccactgaagctattcctactaaggtaggaactgccactcaaggccttcttggctctaaaatcccatgagcctttttcagttcaccctacaatttctcaataccactctaaagtttatgagttttttagttaactttaatccagtgactctttctactttatcccaatccaagtattctcctccttcttcacttcattttttttttttttttttg

SEQ ID NO: 2254 - DNA, 900 bp, Homo sapiens
  misc_feature (1)..(900): DMR16:21501601
cctcgcctccccgcggccttcctcccccagccggggcggaggagacccaggaagccgcgcccggctcccgggggtggagggcctaggccgcgcctcccagccccgcggccctaggcctccgcccgcccgaggcggagcccgggaggtcggggcggggtcccgggccggtcacccacctgggttgccagtcattccagctccgcgaatagttggtgccgttggtgccgccgccgccgccgccgccgccgccgccgctcagccgagaccccggggctctgcggctcattaccttccccgacacgatatggccaagcgccgccgcccagagaagcgcgagtcgccacccgaaccggccgccgccaacaccccgctccggcccggggctgagaaggaagccgagaaggaggaggaggaggaggcggcggcgggcgggggaagaggacgaccgtttcgggttccgcctgagcccgcagcacaggacgaggaggcgggagcggcgcggtgagagagaggcggatgaaggggaggcgacgtctcttccagggccctgcgcggcccacgtcgccggggcccccgaggaggaggacgacgaggaacaggcggtggcggcagctcctcacgctcacacggccactgcttccccgcctcccggctccgctcgccgcgccgccgctgtcgcacggcatgctgggagcgagaggcggggtcggccccgccgtgcctgcggagagaggcgggtcctgtcggcggggcggggccgatagcaggccgccccgccccccacggccccaggctcttggacggcgaagaggtctgggcgtagcggtgacgaatcctaagacgggatctccactactgcggccacacacttttctcccaaatgcttcccggaaagcaccg

SEQ ID NO: 2255 - DNA, 1800 bp, Homo sapiens
  misc_feature (1)..(1800): DMR16:21877201
tgggaaatgaggaacttgacatcttcaatataatggattccactaaaataagatgacgatcaataggaaccaactaaaaaaatacttgactagctgttattgaaaggctgaaattcagctgacataagcagtattaatattgagctagaaaataattcgcattgaattcagcccaacttttgttttctgatttgggtctcttctaaattttttttttcttctggacattgagaacaatccaatttgaaggcctcaatgcccaaatctacactcttgttttattctatatccttggtttcttctttttttttgagatggagtctcattctgtcgcccaggctggagtgcagtggcgtgatcttggctcaatgcaagatccgcctcccgggttcatgccattctcctgctgcagcctcccgagtaattgggactacagatgcccgcccccacgcccggctaatttttttgtatttttagtagagacggggtttctccgtgttatccaggatggtctcgatctcctgacctcgtgatccacctgcctcagcatctcaaagtgctgggattacaggcgttagccaccgtgcccggcccacacctaggtgatttttaaagttcttctagtagagacagggtctcactatgtcgggtcgccgtgtttgatgtcagttttccctgccagaatctacaatctccttgatcaccattatatcccaacgaagagctcagtacctggtacaaagcacatttgatcaatacttgctgaataaagaaataaaaatgaagaggcactccagcctgggcaacagagtgagatggtctcaaaaaaacaaaaacaaaaacaaaaaacgactggaaaggagatgagggtacttgtgaagccatattatatgacacgctctgtgctaggacttttatataccttgtctcatctcttcatctcatataatccttacaagtacctcaaaagtggggaaatccccatataactgaagacgaaggcagttcagaagttcattgatttgccctaaggttcctcaatttgcaaacgtcaggccaatgatccaaccccaggtatgtttggcagtgaaggaccagttgagtcacagctgcaagtaaccaccctgcagtggtccctatcttggccgttagcttacattgacatttaacactcaaatttactcagtaacaccagctatcatgttttccactaaaactccacagcattctggcaacttttctattttagagcaataaagtaaattgttagcatccctttgacatataaatatttctacaaatagtaattctctagccattcatttggagtatttaaaactcaacattcatagcacattttatgtgacaaagaacttatgttcagaacacaaaaataagtcgtacgtcttcattaaaaacaggtgaagaatttgaacaaacatttgcaaactaaaatacaaatgaaatacactcaacatcattaaacaagaaaataaaattatgagataatcactaataatcactacatatgcaccacagtgattaaaatttttttaagttaagccacgtgacccaacaaggtgcattcactcaagagaaacgcaaatatatgtccactcaaagacttgcacatgaatgttgagagcaggtttatactgaatagcgcaatgtgaaaaaaccccaaaatctagcaaaggatgaagggagaaataaactgtggtaaatacatacaatagaacactactcaataataaaaaggattatattcctgatacatgcaatatgggtgaaccgtaaaaa

SEQ ID NO: 2256 - DNA, 3100 bp, Homo sapiens
  misc_feature (1)..(3100): DMR16:22409701
ttttgcattcccaccatcaatgaatgagagttcctgttgctccatatttatgccagtatttaatgttgtcaatcttttgggtttgggcccatctaataggtgtgtagtggtatgtcattgttttaaatttgtaattccctgatgacatatgagcatcttttcatatacttatttgctatctgtatatcttctttggtaaggtgtctattcaggtcttttgcccttttttaaaccaagttgtttgttttcttattgttgaactttaagaatttttagtatattttggataatagtcctttttcagatcctgcttttgctaatagtttttcccatctgtggcttgtcttctcgttctcttgacagtatctttcacagagcagcagtttttttaagtttcgcttatcagttctttctttcattgaccatgccttttgtgctgctgtatctaaaaagccatcaacatccccaaggtcacctagattttctcctgtgttattttctaggagttttctagttttgcattttatgtttaggtctgtaatccattttgacttaatttttgtgaagggtatatggtttgggtctagattcatttttttggcatgtggatattcattattcctgcactctttgttggagactatctttcctaattgtattgcctctgctcctttgtcgaagatcagttgactatatttttatgggtctattttgaacaatagaactaaatagtcctattgttctattctttcatcaacaccacacttcttgattactgtagctttatagtaagtgttgaagttgggtgtgtcagtcttctgactttgttcttttctttccatattgtcttggctattctgggtcttttgcctctccatataaactgtagaacaaatttgtcagtatccaaaaaataacttatggggattttgacagggattgcattgaatatatagatcaaagaagagctgatacattagaatattgagtcttcttatctacgaacatggactatctttccatttattttgatcttcttttatttctttgattttttttttttttttttttttttagacggagtttcgctcttgtcacccaggccggagtgcaatggcatgatctcagctcaccgcaacctctgcctcccgggttcaagcaattctcctgcctcagcctcccaagtagctgggactacaggcatgcgccaccacacctggctaatttttgtatttttagtagagatggggtttcaccatcttggccaggctggtttcgaactcctgacctcatgatccacccgccttggcctcccaaagtgctgggattacaggcgtgagccattgcgcctggcctgatttctttgattgattgattgatttttagagatagggcctcattctattgcccacactggagtgcactggtatgatcatagcttactgcaacctcaagctcctgggctcaagtgatcctcccatctcagcctcccaagtagctgggaccacaggtgtgcaccaccatgcccagctaaactttttttagagatggggtcttgctatgttgccgaggctggtctcagactcctggcctcaagtgttcctcccacctgagcctcccaaagcactgggattacaagcttgagccatgcccaggctgatttctttaattagaatttgtagctttccttatatggatcttgtacttattttgttagacttatactgaactatttcattggagggtgctaatgtaaatggtattgtgtttttactttaaaatctacttgtttatggcttgcatataagaaatagattgacctttgtatgttaatcttgtattttgcaaccttgttataattgcttattagttccaggagaaagtttttttttgtttattattttgggttttctacatagaaaaggatattgtttgtttttgagacagagtcttgcactgtcacccaggttggagtgcagtggtgtgatctcagctctgtacaacctctgcctcccgggttcaagagattctcttgcctcagcctcccaaatagctggaattacaggtgcctgccaccacacccagctaatttttgtatttttagtagagatggggtttcaccatgttggccaggctgatctcaaactcgtgacctcagatgaggtaatctgcccacctcagcctcccaaagtgctgggattacaggtgtgagccactgcaccaagccagattttttttttaagtttttcttacaacttttcctccattcttttatttatgaacattttcttttcttttcttttcttttctttttttttttttgagaccgagtttcgcttttgttgcccaggctggagtgcaatggcgcgatctcggctcaccgcaacctctgcctcccaggttcaagcaattctcctgcctcagcctcctgagtaggtgggattacaggcatgcgccaccacatctggctaattttgtatttttaatagagacggggtttctccatgttggtccggctggtctcgaactcatgacctcaggtgatccacccaccttggcctcccaaagtgctgggactacaggcgtgagccaccatgctgggccaaacattttcaaatatacaaaaaagttttaaaagttacacagtaatctacattcaactatttataacctactgtattaattttatcatgtattaattaatgtatccatccttctgtcaattaaaccatcttattttcctcacaactttttattataaaattttccaaatataaaaaaagtttaaagaaaattacagagaaaatacatgcatatacccacttcttagattcatcaattgctgacattttaccatatttggtttatctgtatctctgtgtgtatgcatattctgttctctggactatttatttttattttctatttttatttttagagatgggattctgctttgtcacccaggctgagagtgaagtggtacaatcatagctcattgcagcctcaaacttatttatttacttttttagagatggggtcttgctgtgttgttcaggctgatctccaacttctggcctcaagtgatcctcccacctcagtc

SEQ ID NO: 2257 - DNA, 3800 bp, Homo sapiens
  misc_feature (1)..(3800): DMR16:22464701
ttttagtagagacggagtttcatcatgctggccaggctggtcttgaactcctgacctcaggtgatccacctgcctcgtcctcccaaagtgctggggttacaggtgtgagccactgcacccagcctaaaatgatggttttctgattctagcatttctttgataagattgctatgtaaagcacagcttttccttttttagggaaaaatgttttttaacagctgcaaaataaatattctttcaatggaatgacaaatagttatttattattttatttttgccatatatttattttaaaaatttatgtataatggtaacctgagcctgcatgttattcatgtgtggtgccatactgatcttccttaattttaatatgaagcaagtactaatatactaaagcataaattatataaaatttgctttatattttggattgcaaagtaattgttgtactttatagaaaagtttcccaaatccattttacttttttgtatttgaaatttaatcacaggtagaatcttaaagagagcatttagggatattgtaaacagatgttattaaggactaatgttaactgatgtcaaaggactaatattaacaaacattgaagaagagaaaacagtatctgtttttagcttaacagcttagtggagcgaaatattttcagtttatttattttatttatttattaattttttttttttttttttttgagatggagtctggctgtatttcccaggctggagtgcagcggtgcaatctcagctcactgcaacctctgcctcctgggttcaagcaattcttgtgtctcagcctcccaagcagttgggatttacaagtcaattcttttttttttttaactaaaactacagaatctatttttcttggtctcatactcaggtttttatgtaggcacttcgtaaataatgaacctaatttgcttgttttctccctattttgttgaatgttcacggtttgtaacttttatttttaagcttgtaatgaccagcctgcagtcaattcttgaaaatgtggatacaccagaattgctttgcaaatgtgttaagtgcattcttttggtggctcgatgttaccctcatattttcagcactaattttagggtgagttcctcattccgctgttcagatcatggggtgagggggatggttgtgtgtgtgaggaactgaggaatcagatggaaaacagtgcctctgctcctttgaatataatcagtgatatttgaggttccagggttaaatgccgcatttttctttctgacgttcgtaccttaaaatatttgaagaaaataaactatttcattgttgtcagaaatgtagttcttttattttcctgcccctctcccctttctaagtttctagaatgtcaagtaggtagaacatagatgctccttttaggatcttttgctgtgaaatggtccacaggtggattgcagtaatatcttaaaatgattggccccctctctctttgtttccatcaaggatacagttggtatattagttggatggcatagagatcatactcagaaaccttcgctcacgcagcaggtatctggtaagtcttgcagcctataccagttatttaaatactgtcggggaggagcagtggtcccccagtgaccatctatcaataccatttctttaataatgcaagaaaactaattcagagaaatgttttattgtaaatgaacatgacttgttagctaaatatatattttcagaggaaattactagtaggtgggtagagtaagtacagacaggacttacccaagttatttgtagtttgtactggtaggaaagtatatggtaagaatatattgcagtggcaataccctgaagtggacaatggaagatccaagttatttgtcacattttattgtttttctggttatttttttaaaaaaggaaatatagggttaatttggagaattgtcataaatgagaagtggttttgtttcccacttttttggagttaagtgaatgactagcgtggctcatttgcacatttcagcttgtttcaagtgtcatagtttctcgtaacttacttggtgtaataaacttttgaaaataagatattcaggtgatagtggtctgtttcattttcactgaggagatgagtatacacctttaatggttagatgtggccctgggattagccgggccaatggtagattgtggcattttagtcttaagtcatgtgtagtgacaatatagatatgaaatttactgaaaaagtaaggaaataacatttacctgttaatttctgcagaaattaaggaggtattaattaaagaggtattggttaatcgtgatcagcatgtttagcagtcttaattttatgatataggacatgttttagggtatgctgcttgaaaaccagatactttttaaaagaagcctcttatattttttaatttggattttttggtgttttttctcccccctaccctttcacaatttcttacgcgattccaagggtggttgcagagtttggagccattttgggtagctgatcttgcattttctacgcctctacttggtcagtttctagaagacatggaagcatatgctgaggtgagtatatagaaagctgtttcttaaaattttggttaagaaaaaatcttaaattgtgctagatttattttaaaatggctcagacctcctgacatttaagcagaaattacaagcccattgcaatattttgaaaaattttttctttttgagacggagtctcgctctgtcactcaggctggagtgcaatggcacgatctcagctcactgcaacctccacctcctgggttcaaatgattctcctgcctcagcctcccgagtagctggaattacaggtgcccgccactacgcccagctaatttttgtatttttagtagagacggggtttcaccatgttggccaggctggtctcaaactcctgaccactggtgatccagccgcgtcggcctcccaaagtgctgggattataggcatgagcccccgtgcccagtcagtattttaaacatttatttcagatgtgtttaagttaccaggagaattactggagagactaaaagaaacgttgcaagcttcgtatttcgcaaagctttacatactctcggtagctggtatttttctaaagacatattttgttatttatttttattttttgttcccagtcttcagagtcttaaagcaaattgatgttgtgttataaaaaaacacaaaacaccaaaagctcctaaagattttcctcttacatatgtacaggagatcttgaatcgtactttggaggacaagccttggcttcagccagcttttgtggctgtacgaatatagcataggagctttaagagcgctgctgaagcctctgttactggtacttggcttttctggccccactgtcatggcttaactctgtgccatctcttatctgaatctctttgtgtttctcccttattcagatcaaccagtcaaggctcccataaagattttggcctcatcttgtttttttcatctttgctgcttgtagtcaacaggaattcagtacctttagctgtactgatgtgtttactctttcctagaaaagcaaggaaatgttttgcttctgcgttgttttttctttgcccccacacctagaatgtcttttttcacagcccacgtttaaagctgatctacctctcataagccacacattctagtttgtagagatgcttccccttgttatccttaagatctcattctcttctgttattttggtgcttaattttaggtagatgtatacattggttctgg

SEQ ID NO: 2258 - DNA, 200 bp, Homo sapiens
  misc_feature (1)..(200): DMR16:24260701
gcagggatgcaggagacaccagacacacacaaacttagaggcagcaaaggacacgctttgcatggagagacaattgacctgtgtagagacacccacactgggaagccaacaagaacgcccaactcattaactggaaagcacgggaggcattcacaaagtagagccctaacctgctgcgtgttatcaatagtggcctgtga

SEQ ID NO: 2259 - DNA, 900 bp, Homo sapiens
  misc_feature (1)..(900): DMR16:24779901
acaactctgcagaccagccctgggctgccattttggggctgtgcctcagacacttattgatggtttaaattgagacttgagacctcttttttgcagttgaccacttagaccccaaagaggtgaaataactgtttaatatgggggcccacaaaccatgtaatgaaagtgaaggctttggggggatgactaggctcaacaggagcaatattgttcttataggccaaagtgttctatcctattttttatccacctgacatgatccatacagaaaaattaagaagactaacatagtgaacactcgtataccctccacccaaaactggtggtggttaacattgtcccatcttgacttgacacacctctctttctctctctcatatatgcatgcatgtgcacattattgttgaaccacttaaaagtaagtatgcaaacattatggcacttcaactttaatccttccacaggtaattatcctaagaataagcatagtctcctatacaaccacaataccattatcacccctaagtaaaagaacaacaacaatatcttctgatagtttatatccacatttttgctagttgtcccaagaatgtattgcttgcttgtttgttcacagtatgttagtgtttatataaaatataaagcatatagaacactatgtattgcttaggggatgaattcaaatgtagtgagatataaagatttacatgagtgattaccactggtatacctactggcgaaggaaagagagagaatacctgcgagttttttctgccatattagtaacgcatttcttaaggtgtatgagtatattttatattactcttttatggccttatctattatgtttgaagtagttttttttttttaaagaaaaagacatttgaggcataatggtga

SEQ ID NO: 2260 - DNA, 900 bp, Homo sapiens
  misc_feature (1)..(900): DMR16:25382501
cacgccattgcactccagcctgggcaacaagagtggaactccatgtcaaaaaaaaaaaaaaaatcgggttatataaattagagcatctctctgttagaatataatgttcaacgttgtttctttgtggaaaaattggaaactagcctgaatgttcatcagtacaagactgattgaatacgtgggtccacatatggaatgtagtgcagtcattaaaaacagtaagtaaaaataaactgtggtacatcccttttatgaaatactactcagcaaaactgagtgaactattggtacacacgacttagaggaatctcaaatgcattatgtgggacaacagaagccaatttcaaatattgtgtgatttcattgatgtgacgttcttttttttttttaagatggagtctcactctgtcacccaggctagagtgcagtgacatgatctcgactcattgcaatctccgtctcccgggttcaagtgattctcctgcctcagcctcccaagtagctggaattacaggcacatgccaccacacccagctaatttttgtatttttagtagagatggggtttcaccatattggtcaggctggtcttgaactcctgacctcaggtgatccacctgcctcagtctcccaaagtgctgctgacagatctgtctttgaagatcctaacaagacccctgagagacagatactattatcgccaacagaaatgctagcctttctctcagccacaaaattatttttttttaattttttagagaaagggcttcactctgctgcccaggctagagtgcagtggtataatcatagctcactgcagcctcaaactccagagctcaagccatcctcttgcctcagcctcccaagtagctgggatcacaggcatgtgccactatacttg

SEQ ID NO: 2261 - DNA, 1000 bp, Homo sapiens
  misc_feature (1)..(1000): DMR16:26240901
gcatctctaagtgccatctaagtgcatcctggaagagagcccactgccttgaaaggtgagtcccagccaggtagcattcttcacaagttgtcttaagagcccttatgccttaagggaacgtcagcggtagtctggcagaactccccagggcctgtggtggcagtggctacggggtaggctcctctgcctttcgaaagggaagcgaagagtgggaacaattgtatcttgtgtgttgagtgccagctcagctgcggtatagtagaacacaaggtagacttctcaggattttgactctagtctctgactcctgggtggcacctctggaccacctgggcctgagggaacttggcactctgaagggaaggatgcatgcctgtctggctttgccacctgctgattatagagatccagggcctggagcaaacataggtagttgccagggagtggttatagcaggccttgggtgagacctagtgctgtgctggcttcaggtctgactcagcacagtcatagtggtggtggccacaggggtgcttgtgtcactccatccccagctttaggtggctcagaacagagagagagactttgtttgtttgggagaaagtaagggaagagaacaagagtctcggcctggtaatccagagaattatcctggatcttgccgaagaccatcaaggtgttacctctaagaatctgcaaaaactacagcattattggggttgggggtgcccatgaagcagttacagcttagatcacagcacccaagtcttttcaaatatctggaaagccttcccaagaaggacaggcacaaacaagcttagatagtaaagactataataaatatcaaactcatcaatgcccagacagcaaagaacatctactagcatcaacaccatccaggaaaacttgacttctcaaatgaactaaataagccaccatggaccaatcctggagaaacagagatatgtgacctttcagagagagaattcaaaatagctgt

SEQ ID NO: 2262 - DNA, 3400 bp, Homo sapiens
  misc_feature (1)..(3400): DMR16:29524001
agccgggcgtggtggcggatgcctgtagtcccagctactcggaaggctgaggcaggagaatggcatgaacctgggagatggagcttgcagtgagccgagatcgcgccactgcacttcagcctgggcgacagagtgagactccatctcaaaggaaaaaaaaaaaaagaaccaagaggtgtccaggcgaagagaacagcagatgcaaaggccctgtggcagaaacaatcttggtatgctggaggaataggaaggcagccagtgcagctggagcaggataggttaagggaggatcaaggtgatgagggcctggaaagaggggctggggtcgaatcaccagatcctgttggttgcaatggaagagcctggagtttattctcagagcagtgagaagccactggaaagttgtttttttgtttttctgtttttgagacagagtctagctctgtcacccaggcagactgcagtggtgcaatcttggctcactgtaacctctgcctcccaggttcaagcgattctcctgcctcaggctccccagtagctgggattacaggcacatgccaccacacccatctaatttttctttttcttttttttttttttttttgagacagagtctctgtcacccaggctggagtgcagtggcgcaatctcagctcactgcaacctccacctccctggttcaagcgattctcctgcctcagcctcccgagtagctgggactacaggtgcatgccaccatacctgggttaattttttgtgtttttagtagagacaagatttcaccacgttagccaggatggtctcgatttcctgacctcgtgatctgcccaccatggcctcccaaagtgctgggattacaggcgtgagccaccgtgcctggccagccaccggaaagttttatgtaagcaggggagtgatctgttttatcatttagaaggatacacacctcttcttctttttttagagacagggtctagttctgtcacccaggctggagcccagtggcacaatcatagcttactgtaacctcaaactcctgggctcaagtgatcctcctgcctcagcatcccaaagtgctggattacaggcatgagtcaccatgcctggtcacacttctcattctttaaaccagacctcatttgtccatctcccccatcccccgccccaccccacggactgtcctataatgcccatacaacaggtcactgtttagaaagtgctacaaagttacaaacacagtcccttctgagcctcccaccaatgttggtgggtacaaggtcaaaaaaaaaaaatctcatctatctaaggggcataggagactttttagttagagggcccaattatagtcctcctgaaaagatgccaaaagtccccttcaacacttagcaaagattcaagaaagatgaatctcacattctttgtatgggaaatgaggaacttgacatcttcaatataatggattccactaaaataagatgacgatcaataggaaccaactaaaaaaatacttgactagctgttattgaaaggctgaaattcagctgacataagcagtattaatattgagctagaaaataattcgcattgaattcagcccaacttttgttttctgatttgggtctcttctaaattttttttttcttctggacattgggaacaatccaatttgaaggcctcaatgcccaaatctacactcttgttttattctatatccttggtttcttttttttttttttgagatggagtctcattctgtcgcccaggctggagtgcagtggcgtgatcttggctcaatgcaagatccgcctcccgggttcatgccattctcctgctgcagcctcccgagtaattgggactacagatgcccgcccccacgcccggctaatttttttgtatttttagtagagacggggtttctccgtgttatccaggatggtctcgatctcctgacctcgtgatccacctgcctcagcatctcaaagtgctgggattacaggcgttagccaccgtgcccggcccacacctaggtgatttttaaagttcttctagtagagacagggtctcactatgtcgggtcgccgtgtttgatgtcagttttccctgccagaatctacaatctccttgatcaccattatatcccaacgtagagctcagtacctggtacaaagcacatttgatcaatacttgctgaataaagaaataaaaatgaagaggcactccagcctgggcaacagagtgagatggtctcaaaaaaacaaaaacaaaaacaaaaaacgactggaaaggagatgagggtacttgtgaagccatattatatgacacgctctgtgctaggacttttatataccttgtctcatctcttcatctcatataatccttacaaggatctcaaaagtggggaaatccccatataactgaagacgaaggcagttcagaagttcactgatttgccctaaggttcctcaatttgcaaacgtcaggccaatgatccaaccccaggtatgtttggcagtgaaggaccagttgagtcacagctgcaagtaaccaccctgcagtggtccctatcttggccgttagcttacattgacatttaacactcaaatttactcagtaacaccagctatcatgttttccactaaaactccacagcattctggcaacttttctattttagagcaataaagtaaattgttagcatccctttgacatataaatatttctacaaatagtaattctctagccattcatttggagtatttaaaactcaacattcatagcacattttatgtgacaaagaacttctgttcagaacacaaaaataagtcgtacatcttcattaaaaacgggtgaagaatttgaacaaacatttgcaaactaaaatacaaatgaaatacactcaacatcattagtcatcaagaaaataaaattatgagataatcactaataatcactacatatgcaccacagtgattaaaatttttttaagttaagccacgtgacccaacaaggtgcattcactcaagagaaacgcaaatatatgtccactcaaagacttgcacatgaatgttgagagcaggtttatactgaatagcgcaatgtgaaaaaaccccaaaatctagcaaaggatgaagggagaaataaactgtggtatatacatacaatagaacactactcaataataaaaaggattatattcctgatacatgcaatatgggtgaaccgtaaaaatatcatgctgagcaagagaagccaaacacaagagaacatgttgttatgatttcacgtacatgaaactttagtaaagacaagtctaatccatagtgacagaaagcaaatcagtaactgctgacaggggcaaatgaggagatgatctcaagggaaccttctggggtaagatgct

SEQ ID NO: 2263 - DNA, 400 bp, Homo sapiens
  misc_feature (1)..(400): DMR16:30038901
aggaagtgaataaaaattttttaaaatcatattttctgaatttatttgtccctataatgttaggcagatatagaaaacataaacttattttcctaaggaactgaaaggcttttttaaaaaggagggaaaaaacaccactgaatacaatttagacatcctcattcatattttcagaacttatccttctcctcctccttcctctcttttttttttttttttttttttttttttttagatggaggttcgctcttgttatccaggtatccaggctggagcgcaatagcgcaatctcagcttaccgcaaacgtcgcctcccagattcaagcgattctcctgccttagcctcccgagtagctgggattacagccatgcgccaccacgcctggctaattttgtattt

SEQ ID NO: 2264 - DNA, 1100 bp, Homo sapiens
  misc_feature (1)..(1100): DMR16:30621001
gatggcagaccttgctgtaatgcacacattggtttaatctgtgcattaatagctgtcagatcatgaaacagtaggaaacattttcctaacttttttggaattacaaatactgatgaattccagggactgactcttcaatatgtcttgcatccagttgctcttttactagctgatggagttgagttagtttctcctgtgataggggccattgatccacccatacaggcttgtcagtcagccaccctagcggcaaagcattgggtggaggagaaatattaatgacccctgtcagaaatcctgacgacctagcccttttctatctgtttgcccagttattgatataggatcagggtttccctgttgggactttcctaagccttttccgttctgatatcccattttctttaacattttaaatcctggattgtcaatagtttcatttgtaagtctcatatcctgtgctgtaagtaaatcttggccccataggttaacagctatatttgcaacataaggttgaaaagtacacgactgtccatctggtctgagacgggtaaaatctcagcactctgttgaacactttgaacttttcctactcccactaaggatgtagaagttaattgcaggggccaggatgggggccaattgtttttagatattactgacacatcagctcccatatccataagcccatagaacttttttcctttaatttgcactgtacaggtgggtcgattagaagctatcgtttggggtaaatttcccttctggttgtactcccaaatccttgattccctcatttctccttatgtggagaagggtaatttgcaggcaataggcagtagttgtatattctcctggttcaaaaacccacagatcttgtgacattaccactacttgaatttctccttcatgatcagagtcaattcctgggactatagtaatgccctgtaagttgagacggcttctacccaaaattaatcccatatatcctgttggcaaaggactccaaatgccagtgggaattttagtggtttttgtctcctctgactaacgtaacccattctctgactgggagagctattcctgcgcttccaggtgtt

SEQ ID NO: 2265 - DNA, 800 bp, Homo sapiens
  misc_feature (1)..(800): DMR16:30734801
ggattttggagtctttagttttaggtttgaattccagtaatgcttcttaattgtgttaagacaagttacaatcgtcactcttctgaacctcactttctattaaaagtaatgtgggcagggcatggtgggtagctcatgcctgtaatcccagcactttgggaggctgaggctcccagctggagagctctgaaaacacacaaatgctcagacccaacaccccaaaattatgatagattttgagacagggtcaaggaataaatcttttaagaacctttccaaatgtgattttattatgtgtaagtatttgaaacagcgtttcacattaagtacaaagcattttttttttttttttttttttttttttgagacggagtctcgctctgtcgcccaggctggagtgcagtggcgggatctcggctcactgcaagctccgcctcccgggttcacgccattctcctgcctcagcctcccaagtagctgggactacaggcgcccgccactacgcccggctaattttttgtatttttagtagagacagggtttcaccgttttagccgggatggtctcgatctcctgacctcgtgatccgcccgcctcggcctcccaaagtgctgggattacaggcgtgagccaccgcgcccggccacaaagcatttcttatatccacctcaccatctaatcctcaaaattatttccttttcattagtatttccacttaagagaagtgtttaagttggtgcaaaaataattgcagtttttgacattacttttttttttttttttttttttggagacggagt

SEQ ID NO: 2266 - DNA, 300 bp, Homo sapiens
  misc_feature (1)..(300): DMR16:31436101
acttccaggcctcccagaggcactgcaggcactgcgggaaggccggatggaaccagaggctggagactgagtggggggccaggataaaggaagggaggtcggggcaggagtgtggatgggggcagatgttgaaggaaggacccggggctcccacagggccggagcccagaggtgctgtccggggcgactgagctgggtgcgaggctgacgctctccacgctcccacccctgcaggtcttctcccctgggtgcggaaggacgcgctgggagagggaggtcttctcattgacactgtcaccg

SEQ ID NO: 2267 - DNA, 700 bp, Homo sapiens
  misc_feature (1)..(700): DMR16:31702301
ggtttcagtgagccaagatcacaccactacactccggcctaggcaacagagcaagactccatctcaaaaaaaaaaagcagcttggttttgtgagcagtgtgcttcttagaagggttccaaggggcattcttgaaataggagatgggaaattgaggttgggtgactagataagtggtggggggccttcacacgctgagaccagtttgtggaggaagatgaatttcatccctgcaggatgggtcttccatgatactgaagggagagccacatgttgatgcccaggaccagctgcctccttggtctgaaaggcctgatcgaggccaggattggctatgagagctgggaaatgggaccatctttgaagccatgggagagggtgaggtgagaatgaggagaggctggggggcccaacactcccagctcaggactggaggaagaggatggagctggagagggagggacgagggtgtggcattggtcagggaggaggaaaggaaatgagcagtggcctgggtgctggtgagtggacagatgtacctgggctggagaagcccctggggcttggccctgagggtggccttggtgatgtggggagagtggtttggacagcgagctcaggtggaagccagactgtggtgggctaaggagcagttgaggagggaggcacaggatgtgaaagggagaaggtgcagcttgcagg

SEQ ID NO: 2268 - DNA, 1400 bp, Homo sapiens
  misc_feature (1)..(1400): DMR16:32065801
tgataaaaaccagcccagccctgaccctgcagctctgggagaagagccccagccccagaattcccaggaatttccatctggtgatcagcactgaacacagaggactcaccatggagtttgggctgaactgggttttccttgttgctattataaaaggtgatttatggcgaactagagacattgagaggacgtgagtgagataagcagtgaatatatgtggcagtttctgaccaggttgtctctgtgtttgcaagtgcccagtgtgaggtgcagctggtggagtctggaggaggcttggtacagcctggggggtccctgagactctcctgtgcagcctctggattcaccttcagtaaccactacacgagctgggtccgccaggctccagggaagggactggagtgggtttcatacagtagtggtaatagtggttacacaaactacgcagactctgtgaaaggccgattcaccatctccagggacaacgccaagaactcactgtatctgcaaatgaacagcctgagagccgaggacacggctgtgtattactgtgtgaaacacagagtgaggggaagtcagtgagagcccaggcacaaacctccctgaaggggtcccagaaacgactagggggcgccaggacactgtgcacggggctgtctccagggcaggtgcaggtgctgcggagggctggctttctgccatggcctggggcagcctcatcgtcaaatttccccaaggaacttctacagatttacaattctatactaacatttgatgtctctaaatggaaaacggttatttttttgttcctttgtttttgtaacaagaggaaacaccctcacctccacagaagccagggtgtcactttgggggcagaaataatcctttcatggtcaggatgagagtcctgaggaatctcagggaaacctggagagtgttttccaattagactcagagcagagacctccatgggaatctctgattagaacaggccttgagctctgatgggagccaagagagaggctcacccagggtcagggtccttaaaacctgatggttttcacagctatcccctctcaacttgtaaaactgtgcccatctgactcagactgattcagctgaccctctttctgctgatccattttccatctctgtagacttgattctcacagttccctttcttcttctcttccctgaaaacagaagatgtgttttctgtagtcaaaattccagggcttgggtctgcaggacctgggtaggctgaggggactttctcactcaccattgtctggacactcctgttgtcttctgtgcatggaggcatttggaaaatgtagtggacattagccatgaagggaataatactagttttctccaatgggatattgatgtagagctga

SEQ ID NO: 2269 - DNA, 4300 bp, Homo sapiens
  misc_feature (1)..(4300): DMR16:33904901
caaagaaccagcttttggtttcattgcttttcttcaactgttttcaatttcatggatttctgctcctctctttatttccttctgcttgctttaggctctccaaagaccttaaaggatatctgttttatttattatagcaccccacagatttactgatattcccattttatagatgaggaagctaaggatcagaaagtggttaagtaatttgcccaatgtcccaaactactaaatggtggagccagaactcaaacccaggactgtctgactccagagtctgtgcttctaactactgagtgacattgcctcctagccacataactcccaggccaagtccttctactacagcagatgcctcaccaaacactgccaaggtaagcaacttctcagcttaccttgggcactcggtacctcctgccttccctcccagggaccatcaactttccccacggtccaattgccattccctcaattctcttgaacaaaaaccaaagtgggctggcttgtacagggatcaagccttcagaattgccttcgtacgtaccttggacttgactgaactataggtggtagaatctgttggtgaaagacagaaaaaaaaatgaaagttgcatcagggaaaaagaaagttgagtcttatgcacacaattcctctcctcaaaggcttcagaaaccagggaattctgaaacatgagatctccccaggccctaggagtatgacggacttctgatgtccatctatgggaaagggatggagcagaaaatgatgttaattgccacttcctctagaggcaggaagtgacatcaggctgccagccactggcccctcatttaccgaaggctaagggcaagggggcattgtctttgagcctagttcctctctccttccccgcctgtcccttttactctgaagcactggagagaaaatgctaaatatcaggtgcagtccatggaaaccaccacagtgaaacacagcaaatcacagatgctctggagaaatggagaccacacagtgcacctccagacctggggtcaccctgcctcatgggcagggtccccagttatcacccagttatgaaggagactaaaagcatgatttctatgggacttgggtcccactcccttaatatcactggggtggagaaggaaccagagacacatccttgtgggtcctctccaaggctagagagggagcaggttggtccaagggcctcctggggtcccacagggtagtgggcaggtgtggttaatccacactctctggcaggcaagttagatgcccccctctccggacccctccccctgcacaaggtgagaaaagcaagatgggcgatcacacatgacacacggggcgcggggggcggtgagtgattagaagagacatggggtccctctctgccgtcccacccccatgtcttctggcccctcctgagcctgcctctggtgactagggagctcctgtgtgcctctgtcagagacaaacagaaatgctaaaactaaagagagggacaacaatggcggggggaggagtcagtggctgcagccacaaagggagtggccctcatctgtctctgagcatgtaaatcatctgtcctctgccatgagagggccacaggccctgcaaacaggacttagggccccggtttcttaagcaggaggaggcggcccattggggtgactgaggcaggagttagagataaagagaagcttctgggcgtggcatcgctggtctccagagagtgtcggtccccagcccggatgactagcagtggtgagactcggcaaagagaggccacaaggtctgtggcactgcagaagggcagcaattcgatgccccggtgtccaggcaacggggagggccctgggcccagtgagtgcctccttcctcctgagaaggggctctaggatgggaggggcatggactgctggggtaagtggataaaaagcaggggtaactggcatgtcagtgtggggtcctcacagtccgggacattctgcctgcctctgtgcccacccagccttcttataatcacccgccactgttagtgaccgaggccgcgacactgcactgtactctttaaatctccaacaggtctgctggaggaggggagggggaggagaagagaaaggggtgggaggagagcacggggagaggaggagggagaggtgggggtgcaaggaaaaaaggaagaaaaattaaaaagaggaacatgcccagagggacacagccagcccatgagaaattaaaggctgaggaaagaaaccagtgagagagggggaacaaagctccaaccctgcctggggcggggcagctgcacagacaggaggtgggcacggggcaagctggacttccccagggaggtagaaggcccccaacagccccatctccatggtggctggcaggggagggccccgctggggtggcacagggaagctgggcatctggccaggtatctgggaccctcaggaatgcagtgtccaccctcctgcctccccactcccaggcccctgtgctcacctgaccccgggtcaccagggggcactgtcctgccaatgttgggcaggaggtactcaatgttgggcactgcctgaggctccttgctgcccacaggggtctgcgaacaggaggaggggtcaactggcatgccctcggatgctgggctgccgaccccccagaggggggtgccctgatgacagagcccgtgtctcctccatcagactgggctcactggggcagggaccgtctccctcatcagccgggtgctcttaaggatgattcctacatgtcccctgttagacagctttgtgccttcctcaacatctcagaaccacgaaggccagagcggccccttcagctaggggcaggagctgtgtctcccgcactagactggaactcctccaacctaagtccttctcagtagcctggagggcaggagctgcctttactcctgaattgggttacctctgagcaaggcctgtatctcccccatttagactggagattcctgaaggcaagctttgtgcttatctatcagactaggggctcctgaggagagggtctgtgtttcctccatcagacttgagggaagcctcaaggacagacaccttccccagcttaagtctcgctgcctgccccacccccaaggactggggctcaccccagaccagcccccatgccagcccagcccacggcatcacttactctctctctcccttgtcctctttgtcactgaagaaccagtctgactgcagagaagacaaaaggaagggatgaaatcagcatgggaaagaagagtctcttccacctgctcattccagaggacccactcaggcggcaaggggcgcctctctctcaacaaaccccaggctggtggggctgcaaaagagggctcagagggagcttgatggatgctaaaacctgactccacagactatgaaaaacccttggggagagaaaaggtgggaccccagtgtgggaggagacacggcagtgagtgggagcggccacgtcagacgggagataggcttagggagagcttcgcttttacttgcttttctctaaacactgtcctgggcacacccctatggtatactccccacagcgagccggggggcagggaggcaccagtgccgttagtgttggccaggtccatggctgtgacagccgagcatgccccaggccacctgccacccatgggtgccacactgacaacaggggtgtcacatactcagcccagaaaaggaaaatgacaggagaaaggtgttggaggtttcctgacgggcaggaggcgagagctttctcataaaggccaaacaagagacaaaataaagacccccacagtttaatatattttgtaaaatttgagaatcttgaagataaaattctaagttttctgaaaaaaaaatccagattgcttataaatgaacacgtatcacaggtacttggaactttcagcagcaagacacaagaagacaagacaagaaagtaagttttgatgtgtggaaggaacctagaattttataccctgctaaactctcatttaaaaaaatgagaatgtaaaataaagctattcttttttttttttttccaacagaatctcactctgtcacccaggctggagtgcagtggtgcaatcttggctctctgcaacctctgcctcctgtgttcaagtgattctctggcttcagcctcccaagtagctgggattacaggtgcatgccatcacgcctggataatttttgtatttttagtagagatggggtttcgtcatgttggccagactggtctcaactcctgacc

SEQ ID NO: 2270 - DNA, 2700 bp, Homo sapiens
  misc_feature (1)..(2700): DMR16:34946901
tttatgatgattcattcgattctattcaatgactccattcgattccatctgatgatgattccattcgagtccattctatgattccattcaattctattcgatgattattccattctagtccattagatgattcaatttgattccattcaatgatgattccattcgagtccatttgacgcttccattcgagttcttttgatgattccattcgagtccaatttttcattccattcaattcccatcaatgatgattccgtatgatttcatttgatgatgattccatgtgattccattcaatgatgattgcattctagtccattcaatgattccattcaattccattcgatgatgattccattcgattccattaattggtgattccattcatttccattcatttccattccattccaatcgacaatgattccactcgattccattcgatgattccactcaattaaacttgacgatgattccattcgattctattcgatgattccatttgattctattcggtgatgattccattcaattccattcattgttgattgcgttcgattccattagatgattccattcgattccatttgatgatgattccattcgattccaattgatgattccatttgattccatttgaggatttcactcgattccattcaatgatgattccattcgagtccattcaatgattccattcgagtccatttgatgattccgttcaattccattccatgatgattccattagagtccattcaatgattccatttgattccatttgattccattcaatgataattccattagagtgcattcgatgattccattcgattccatttgatgatgtttccattcgattccattcaatgattccatctgattcaattcaatgatgattccactcgagtcccttcattaattccattcgattccattctctgatgactacattcagttccattcaatgatgattccaacagattacattcgatttctccattcgattccattccttgctgattccattctattcctttagatgatgactccattagattccattcgttgatgacttcattagattccatttgataatgattccattcgattctaatcaatgatgtttctatttgattccattcgatgatgattccattcatttccattggatgattccattcaataccatttgatgatgattccattcgagtccattcaatgattccattgaagcccatttgatgtttccttttgattgcattcgatgatgattccattcgagatcatttgatgattccattcaattccattcgatgatgattccattcaagtccattcgatgattccgtttgatttcattcgatgatgattccattcaattctgttcgatgattccattcgattctgttcgatcattccattctttttgattcaatgattattccatttgagtctgttcgaagatgcaattcgagtccaggtaatgattccattggtttcaattcaatgatgattacatgggattccattcaatgattccattctattccattcgttgattattccattcgattcatgtcaatgatgattccattcaattccattcgttgatgattccattcgattccattcgatgatgattccattcgattccattcgattccattcgattatgactccattcgattccatttgatgatgattccattcgattttattcgatgattctattcgattccatttgatgatgattcaattatattccattcgaggattcctttcaattccattcgatgatgattccatttgattccatttgatgctgattccatttgattgcattcgatgatgattccattcgagtgcattcgaagattccattcgattccattcaatcatgattccattcgggtccattcgaagattatactcgattccatttgatgatgattcctttcctatccattcgatgattccattccattctatttgatgatgattctattcgataccatttgatgaagattccattcaattcaatttgatgatgattcaatttgatttcattcaatgattacatttgtttccattctgagatgattctattctattccattcgatgaggattctattcgattccatttgatgatgattacattcgtttccatttgataatgattccattcgtgtccattcgaggcttccatttgattccatttgacgatgattccattcgagtcagttagatcattctattcgatttcattcaatgatgattccattcaaatccacttgatgattccattccattccattcgatgatgattccatttgagtccatttgacgattccattcgattccattctatgatgattccattccagttcattcgataattcaatgcgatttcattcgaagacgattactttcgattctattcgatgattccattcgattccatttgatgatgattccattcgagtccattcgataattccattgaattctattcaatgatgattccatttgattccattcaatgattccattcaattccattcaatgaatattccattcgtgtccattcgatgtttccgtttgatttcattccatgatgattccatttgagtcaattcgatgattccattcgaatccatttgatgattgttttcaattatattcgttgatgattgcatt

SEQ ID NO: 2271 - DNA, 300 bp, Homo sapiens
  misc_feature (1)..(300): DMR16:36391701
tcacagagtttaacctttcttttcacagagcagttaggaaacactctgtttgtgaagcctgccagtggatattcggacctctttgaggccttcgttggaaacgggatttcttcatattatgctagacagaagatttctcagtaacttctttgtgttgtgtgtatgcaactcacagagttcaaccttcctttagacagagcagatttgaaacactctttttgtggaatttgcaagtggagatttcaagcgcttcgatgccaatggtagaaaaggaaatatcttcgtataaaaacaagacaa

SEQ ID NO: 2272 - DNA, 1200 bp, Homo sapiens
  misc_feature (1)..(1200): DMR16:37598701
aactcgttcccagacactgcgtagtgatgtgtgtgtttaactcacagagtttaacctttcttttcatacagcattctggaaaccctgtgtttgtaaagtctgcaagtggatatttggacctcttagatgccttcgttggaaacgggatttcttcatataatgctagagggaagaattcttagtaacttctttgtgttgtgtgtattcaactgacagagttgaaccttcctttagacagagcagatttgaaagtctctttttgtggaatttgcaagtggagatttcaagcgctttgaggccaaaagcagaaaaggaaatattttcctataaaaactcgacagaatctttctcagaaactgctctgggatgtgtgcgttcaactcacagagtttaacttttcttttcattcagcagtttggaaacactctgtttggaaagtctgcacgtggatattttgacctctttgaggccttcgttggaaacgggtttttttcatgtaaggctagacagaagaaatctcagtaacttccttgtgttgtgtgtattcaactgacagagttgaaccttcctttagacagagcagattcgaaacactctttttctgcaatttgcaagtggagacttcaagcgctttgaggccaaaggcagaaaaggaaatatcttcgtataaaaacccgacagaatcattctcagaaactgctctgtgatgtgtgcgttcaactcacagagtttaacttttcttttcattcagcagtttggaaacactctgtttgtaaagtctgcaagtggatatcttggcctcttagaggccttcgttggaaacgggttttttcatgtaaggttagacagaggaattcccagtaacttccttgtgttgtgggcattcaactcacagagttgaatgattctttacacagagcagatttgagacactctttgggtggaatttgtaagtggagaattcagccgctttgaggtcaacggtagaaaaggaaatatcttcgtataaaaactagacagaatgattctcagaaactgttttgtgatgtgtgcgttcaactcacagagtttaacctttcttttcaaagagcagttaggaaacactctgtaaagtctgcaagtggatattcagacctctttgaggccttcgttggaaacgggatttcttcatattatgctagacagatgaattctcagtaa

SEQ ID NO: 2273 - DNA, 900 bp, Homo sapiens
  misc_feature (1)..(900): DMR16:38053001
gtaacttccttgtgttgtgtgcattcaactcacagagttgaatgattctttacacagagcagatttgagacactcttttggtggaatttgtaagtggagaattcagccgctttgaggtcaacggtagaaaaggaaatatcttcgtataaaaactagacagaatgattctcagaaacttttttgtgatgtgtgcgttcaactcacagagtttaacctttcttttcaaagagcagttaggaaacactctgtttgtaaagtctgcaagtggatattcagacctctttgaggccttcgttggaaacgggatttcttcatattatgctagacagatgaattctcagtaacttccttgtgttgtgtgtattcaactcacagagttgaacgatcctttacacagagcagatttgaaacactgtttttctggaatttgcaagtggagatttcagccgctttgaggtcaattgtagaaaaagaaatatcttcgtataaaaactagacagaatgattctcagaaactcctttgtgatgtgtgcgttcaactcacagagtttaacctttcttttcacagagcagttaggaaacactctgtttgtgaagcctgccagtggatattcggacctctttgaggccttcgttggaaacgggatttcttcatattatgctagacagaagatttctcagtaacttctttgtgttgtgtgtatgcaactcacagagttcaaccttcctttagacagagcagatttgaaacactctttttgtggaatttgcaagtggagatttcaagcgcttcgatgccaatggtagaaaaggaaatatcttcgtataaaaacaagacaaactcgttcccagacactgcgtagtgatgtgtgtgtttaactcacagagtttaacctttct

SEQ ID NO: 2274 - DNA, 1000 bp, Homo sapiens
  misc_feature (1)..(1000): DMR16:48659701
ttcactgtgctttgacctcctgggcttaagtaattttcccacctcagcctcctgagtagctgggatgacaggcacacatcagtgtgcctggctaattttttttattttttttatagcgatgaggtctcaccatgttgcttaggctggcctcaacctcctaggtttaagcaatcctcccccacttggcctcccaaagtgttaggatttcaggtgtgagccaccacacctggcctccagctttagtatcttcaatgtttgcatcatatatcttttttctatatttttatacttatttgtgttttaaaatttaaagtgagttttttgaattcagtatatagttgggtcatgctttaaaaaatctagtttggtatctgccttttaattaaaatatttagatcatttacatttaatataataaatgaaaaagttggatttaagtctgccatcttgatttttttatttaaattttttttcatttttctttttatttcttagatctacctaattgtctgacatttgttttctatttccttcatctgctctttactctttatccatctccgtttttttggcctttgatatgatttggatgttgtcccctctaaatctcatgttgaattttaatccccagtgttggaggttgggcctggtgagagatgtttcagtcatgggggtggacacctcatggtttggtgctatccttacaatagtgagtgagttcttacaagacatggttgcttaaaagtgtgtaacacctccctccactccaactctttcttgttcctgctctggccatgtgatatgcctgctcttgcttcacctttcaccataagtaaaagcttcctgaggcctcaccagaaactgagcagatgcccagcaccatgcttcctgtacagcctacagaactatgagccaattaaatctcttttctttataaattacccagtcttaagtgtttctttatagtaatgcaagaatagccaaacagccttcttttgga

SEQ ID NO: 2275 - DNA, 200 bp, Homo sapiens
  misc_feature (1)..(200): DMR16:48913001
ttcactttatttatttatttttttttggaggtggagtcttactctgttgcccaggttggagcgcagtagcataatcatagctcaatgcagcctcaaattcccgggctgaagcaattttccaaccttggtctccagagtagctgggactacagtgaaccatcacacctggctactcaatagcttttgactgatagaggtgt

SEQ ID NO: 2276 - DNA, 1000 bp, Homo sapiens
  misc_feature (1)..(1000): DMR16:49019901
ccacgttctcctcctccagggaggctccattccctgctgcgcccatttatctatatctgccaaggaaggctccccaccacgatgccttcctgttacctggcaaccatcatcaccacacagggctgctagcctgccgccccgccttccacgtgtgcacacacttatatacacagggccgggccaaggagactgtgaggcacaaaagcgagctgtggcgcctgagcaggaaccagcagggaacgtgcagggaaaaggtcctggcacaaaaagcgctgggtagagaaggagagtggcgctccagctgcagtgctgaggtccactgctgtgcgcccttgcataaactgtttctgactctcagctgcagtttcccatttgtgcagccagggtgatgaattcagttattccttaccggctctccaggacaattattttgcataagaaaatacctgggtaatcttggacgatatctggagttgggcatagttcttatagccatggccctgctgcatttctctacttgcagacaggagttaaggtagtgactgaggtcaatcaggtggtggctgtgactcccaactaatggtgtgctagagacccttcccaactgggtgttcagtgaagttgtgtcaggagcttggacactacattggccatagtgggtgtatttacttcatgaaaattggcaagtgctacatatcaaggatttttattttgagagccggttgttacacatttatcagcgcacttactgtcttcagcccctttagacagcctgcaggaagacttctcaccaagggaacttccttccttcctgagtttcccccgatgacttccagacctatgtgctttagggaaggtgttccattgcccactgccagctttcctgcctggctttcccccggtgggcttccatgaatgcagatacagagtcgggagagagaagggaaacgggcacttgcttttaaggactacgtgttcgtggcaggccagaacaaattgc

SEQ ID NO: 2277 - DNA, 1800 bp, Homo sapiens
  misc_feature (1)..(1800): DMR16:51557301
ccctgtggaagagtgtgcactgagacctgccaatttccactccggggatgaataagggagctggggctgctccacccatggctcccattacacattatatgcatatttcaaaatatcacatgtaccccataaatatgtacaatgattatgtgtctgtatttggcagtatgttgtgagtgtcagacacagtgataaattaaacccaaagtcacaactgctaccttcaaagagtggcagtctattatttgattagataagagcacctaagactgctacacagacacagaggccaggacaatgagagatgtgcatctccagatcattctttagccaaagtgtcattgtggccacagaagatgtggctgagtggaggagcagagagaaagggttcctaaaggctaagtagaggcctggagataggatggaggctggagaagaatagcttgaggagcttagaccacatcagatgcctcatgcctgctctggtgggggctgatgctgaaaaggcaggtgttaaccagaacataggaaactttgaaatcaaagcagaaacattcagacctgatgggttgggcaagagggagtcgtggtaggctcttgagaaagaaagagagtcaagagctttcaattttcattttactcacaatgttgtactgtataggcttatttctaggttttgccaattgcgtcaaagggaagagatcagttcgctgagagtgctcacctctgttggaggagtagaggagatggggaggggggaggatgagggtagggtgctggaaatcagggtgctacttgtaagctgtcattggaatcaagtaaggacgggcaaggacatcaggcagtgagaaggaggcttcaaaagaaaattgccaggtcgtggggaaagcagagtgcccaagaggaccatgtctagttttctggcttaagatttagagaaatctgaccctctggttttagtctcctggagctttgcctgaatgcattaaataatcaaaatggaaaagagaaaaagaaagaggggagaaaagaaagagtagagatggagagaagggcagaagagagaggggtaagagtggaggagaagggaggggaggggaaggaagaaggctggcaggaaagagacagaaacatcacacctgcagacacctcccagtcagtaaatcaatcatgcagaaacaagccacgcatagaagtgtgtggaagaagatggtcaaaaatgaactccatgtatccctcatttccctgggtcatcacccaacactctaaagttcagcagagactatccaatgactacaaggaagaaaagaaaccagcctgtgtgtctgagtcaagagctttcaattttcattttacgcacaatgttgtgccgtataggcttatttctgagtttttccaattgcatgccttctgatatctcaggccagcaacttgacttcatatgcacatcttctttctgctatcggcttatgcaaacatgattgaaaagctgagcgtgatggttaatttttatatttcaatttgactgagccatggggtgcccagacatttggccaaacattattgtgtgtgtctgtgagagtgtttctggatgagactgacatttgaatcggtagactgagtaaagcaggttgccctccccattgtgggcacatctcatccagacaattgaaaatctgaatagaacaaaaaagttgagtaagagggtaccccttctgcctgactgcttgagctggaacttgcgtcttttccagctttcagactcagactgaaattttggcccttcttgaatctcaagct

SEQ ID NO: 2278 - DNA, 3400 bp, Homo sapiens
  misc_feature (1)..(3400): DMR16:52424701
gccaaatgatggcagcttaacagacagtcttctttgtccgcaaggtcttagtcactgtgaaagttcaatagaaagttttgctgcaggcatattttcaaatgccaggaaagcatctgacagtgttgggtgtttggagggctattgttaggaagattaagtgctgccctatgttcaatcatttattcaacagccacatggggaagctaacaagaggaggcaagtgtgatatggatgtttggtgggttttgcaaaggagagtttttcttcttattttatgcataaagccaaggagggaatctgaacaagaggcaggtcatatggcctcactttgaagaatagactgttggagttgactctaggcaatgtcctcacataaaaggcaggctgagagtaagagaacaccttccaaaagccataaaactaattattttggcctaaaccaaaagtgagtttttccttttcccagactcctgataaatgctttgttatcagccaactctctgaaaagaattttctttgcaattccactcacttttcttttgacaacaggggtctcgtttttcacaggagaagcacttctctctgttcttaacccacgtacttctcatggagttgaacgcatcctcagttccagggatgagcaggtgacttaagcctaacaaattagatcagtaccctacactagctcatcgtcattgctttatacttgagcacaagacccaattagacccagctaaacacagagattttattgaggtggtgagagaagagaccattctcttttctgctggaaatgctagcagtacagatatttgagctgggcttccagaagtcattgagtgaaaacagagaatgaaaacaccccagtagaacacagaacaaagacatagagagaaaatgagtgctgatgacatgtttgcactcttggcaccagttgtgtctgaagctacttatgtccctggacttcacagttatacaagcaaataaatgcgcttactttccctcagccaatttgatttgtgtttttatctcttgtaattgagagtcctaattaaaacaggaataaacagaataatgcattgtgttaagttctatttcttttaaaactattgagcacgtgctttgggcttctgaagaagtagaaggcattgtccttctgaagtgctaaaggaaagacagtgtttatacatgcacaaagtatagcataatatctacttatagcaataaaaaggggtttatgtagcaaatgaaatacagaagggctgaggtggtccaaagagaaaagtcaacatggaaggcacaggtgtagttttcttggaggagagataagctgggtcaatgtcaaatttggttatttcttcccccgcttagccagatgggcttgggccaaagggtttatgcttgagacagcagtaagagtcttggccaacaccacaatcctcttagatgccactgggaaatctaacaattcagcttcccctcccacgtgctttttggtgtgttggatttggagagctctccagatgctccagggttaagtcagatcagctatagtcatctcaatatccccctacaataactttgaagatgcactattcttgaactctgcgtcctattactgacttcacataaaaattatctagaaatcagtcaatcaacatctttaagcgtctattgtgggcccaccttgtgatgaggggaatgtaaacattcatgtgtaagacacggaccctgtatcccatgagctttacaatcagtagtgacctatataacaaattagattatcagcaaatgcttgtatgtgtacccaataaagtgcaatggttagcatgaaaagagggaggatcagaatgtcagctccctacatgattcagccataaaaaagaatgaaatcacatcttttgcagcaacatggatggaactggaggtcattatcttcagttaaataaaccaagcataggaagtcaaccatcatatgttctcactcataagtgggtactaaaaaatgtgtacacgtgtgcatagagagtggagtgatagatagtggagactgggatggatgaggggatgggagagaggtacatgatgagaagttgttaatgggtacgacatatgttaatcaggtgatgaataccctaaaagccttgacttgactgctatgcaaaccatgcatttaacaaaattgttcatataacccatcaacttgtacaaataaaataataataatagcaataatcatacattttaaaaagctacctgaaagcaaagcttgcatttcaggcaatttgttccctgctagatccaatacagaaccttacaaaggctcactccatatattgctggggattatagaagatttactgaagaaggtgtctgggagtaatatttggaatatacagcccagagtgatgggcaatgctctgcttctaaatgtggaagatttcatcgtgtggggaaaatgccataactgtcattgaagactgtggtttgaatggtttggctggacttccaaagccttctgtacattcacaagtgagtgaaagatgagaggctaagtttctgtatattggactctgaaaacatttcttctttctacccctcctagtcttgtcgtattcattaaaaatcagaaataagagtgaagattggacaaataactgcaatgcattaattactttgggtaaaggaaatcaaaggtctttaagaacgagtgactttcccctgcaatgggaggtttcctaggtcatctcactctctctcacatactatattctatccaagacctgaaatatcattactccttcacagtacatcatcccagcatattttggaatgtccctctttgctgagcagtggttgggtggattgacaatatgtgtgttcagcctacctttctatgtgccctatgttctctcctatcgcagccctcaccaaactgttttgtaattacttttgtctataatttgctggatctgctggcctctgcgcttgttcctctatggtttatcctcaacccagcatccagaatgatctgtcttaaacaaaaggcagattgtgtcagtcgactgttcaaaattctccattgacttcatttctcactcacagtaaaatcgcaagccctaagaatgacctagaagaccctataccagtggttctcctactaataggaaattaacaaaacctagagaggcttatgaaaaacaaacaagcaagcaatgtcaatgctgcacccacccaaaactaattacatcaattcctggagctgttatttttctaaaaggccccccaggtaattctttttaatgttattattatggagaattttgaacatacactaaagtagacaagctagcactttgacctctgtgtatccatcatccagccatctctcaacccatgg

SEQ ID NO: 2279 - DNA, 300 bp, Homo sapiens
  misc_feature (1)..(300): DMR16:53973101
caggatcccatatggcacttagcctcctaagcaaagatcatcagccatagacaagaagcaggtggcctggcatcgagagcagaggttatttttgctgctgggctcccgccatttcagagtttaacagtggcaagtctactcagcaggaggctgaccccagatgctctccccttgtcggacatggagccgtcccatgtcccacctccactgctgggagtaaacctgatcaaatctaggccacagttagactcccagataagtctctgtttaagcttattcccatttgctacttaaatacca

SEQ ID NO: 2280 - DNA, 300 bp, Homo sapiens
  misc_feature (1)..(300): DMR16:54089601
tatagaatggaagaaaatattgcaaatcatataatctgataaaagtttaatgtccagagtatgtaaagagtgcctaaaactcaataacaggaagacaatctaatttttaaaatgagcgaaggatttcattagacatttctccaaagaagatatataaatggcaaataaatacatgaaaagatccttaacatcattagtcaatagagaaatgcaaatcgaaacctcaaggagagattacttcacacctactgggatggcaattaaaaaaaaaaaaagaaaagaaaataacaaggcaagcat

SEQ ID NO: 2281 - DNA, 800 bp, Homo sapiens
  misc_feature (1)..(800): DMR16:54576901
cggggtcccttctgagagggaagctcagctcattttgaaggcagcgctttgaactgaattcatggggtatttgcataagaagatttgaggttgaagaatggctgctattgcatctgcccattaatatgcctgctaattcagcacattgtaagcctattgacagctcacaaagggctcaaattcaaggacagttatcctatggccattgtgagggcttcaattcaaggaatatgttcgctcgaggaatacagttgttacaattagatatttttcatgaaacattataaagaactaatgacaactagaagcacaatactgcaacaaccaccaaaaaacattcagaactccatgagcttgactctggttctctctctctccctgtcacataatctcccccacacttattttcctagatgcagtcggcgggtgatggatagagatctccaaattcgaaagcgcatttatcttgctccctaaatttaaataaaaagcaaaatgaaataaacagatctcggcagaaggggagaaacccacatcgccggcataaatagtggttaatttaatcccgtttatgaaaaacgtcacactgtcacctccgaggaatatacaaagcaatattcgagagcagagatgaattatttgagggggagaaagcttatctcttttcagaggcggagaaaaggtgtttatgtagatctaggacaattcaaaaaccaggcagaaaacggtgctcacggtggccgtgttcaggcggctgggggcattttaagtgagaaagtcgcctctctcaggagggaact

SEQ ID NO: 2282 - DNA, 1500 bp, Homo sapiens
  misc_feature (1)..(1500): DMR16:55544501
ctgagcacctactatgggggaaaaattaatgaaataaaataacgtatgtaaaacacctagcatgatgcctggtttgtagttataattcaataaacagtaactattggcaaaatctcacttattcttaaaaagccaacatcaagtattagttcttctatagagcacccttaacagaattagctttcctgtgtgcactctctccctaggcaccaccttcctctttggctgcatttccctggcccctgacaaaattaatcctttcctacctcttgctctcatactccaggaaggatggttagtggagaaaataagggttttttttgaatctgacaaatcttgggctgaattctggccatgtgacttgcatgcctttaggtaagttaattaagctattgagccccatctataattgggggtaataagggtaatgacacttagcatatggggttattaatgtgttgttctatactattaaaatattgatcttctttagagcaggaaatagggtcctattaatcttgcctggtatatagtaggtgctgaaaaatacgtaataacttgaatatggcactaaaaccttgttaatgtcaggaaaccataaataaaaacaagaacaatacaattgaggcatcacagaacatcaagtggagaaaaagtagaattaaaaatgctaaagcaaaaaatggtgttaagcaaaaaagctgtaaagccaatactaagagtttttttaaaaagcagaataaatgacaaaacataaagttcaaacaaatagtaaaaatatggttgacattagaatggatagagaagatgaaaggcaaagagaaaagaaaaaaaagttttcacataaagggatgggagtttcacataaagggatgagagtggtagaaaatgcagctcgaggagaaagatcttagtagctacagctttacacttccagaattccagacactgacttgtttcaccctcacaatcaccagggaagtagtgatcttagccctctttttagagttgaaatggttcatcaaagttaaatgacatactagttaacacacaagcagacccagggcttagaaacagatctcctgagtacaagcccagtgccccattacctcatataacctatgttctagaaaggtagatgattcaatatattgataatgtataaattaatttacttggcatttaatgtcttaggcttaagacattgttatggaaaggtatatttgtctttcagtttatgccagttcaagtaccaaatgatgaagaaaaaaatgatcctgtcctttttgccaataaagtccggaatttaatggcagagtaagtgtctatatttgattataactcataaataatttgaaaattatttgtgcatgtcgtttaactcattttaaggatttttttttgacccctgaaggcctcgttccccaattcattttgatacgtaaaataatgtgcccagggatgaggtcagtataacaatctataagtattttccccagc

SEQ ID NO: 2283 - DNA, 1100 bp, Homo sapiens
  misc_feature (1)..(1100): DMR16:56885801
ccaggtgcttgcaaagtgccttacacagccttacaagaaccggctgaggtccaggaaattactaacccagtcccaagaacactgaggcacagagaggttaagtaactggccccaggtcacacagctggcaagtggccgattaagtctggctccagttgactcaggtcatggcccttgaccactgccctctgctacctctcgacgcagaggctgagtcaccttcccgggtaactgatgagtttgtaagtgacaggtttcctcactcccaggctttgttctttcccccaccatgctgggctaggcagggcaggggacatgcatggggggtagcattttgtggcctgagcaggaaggaccagggagactagtgtggaggtcaccaaaagagcaggaagagccccaaaagtcaccctggatttataggtgggaagccgaggccccaagcatgtagggtcatgctggtggccacaccaccattcagggagcctgggaggtgcctttcgcacccagacccccgtgggctctctcctgatggctcctgcccttttcccttccctcctcagcccccagtgcctggtgctcacggggccccccaacttccgcccggccctggtggactttgtgggcaccttcacccggaacctcagcctgatgatctgtggccacgtgctcatcgtgagtggcccctggaggggcacaggggaccaggcatggtggctcatgcctgtaaacccagcactctggggagccaagacaggtggatcacccgaggtcaggagtttgagaccagcctggccaacacagctcctgggggagtcgcctgggtgtgatgtccacccacagagtgggggccgaggggatgcggagcaaggggcacccagccaggcaccccccatggaccccattctctccccttcctggcccctcttgctggcttctcccccagctgccctgcctcttttctgccccctccctctcccttcctccccactttctcccccactccttgtgttttcccttatctgggcaaaagaaaagggcaccgtgggtgctgccaagcccctggggcagcctccagggcaggagaggggttgaatctc

SEQ ID NO: 2284 - DNA, 1000 bp, Homo sapiens
  misc_feature (1)..(1000): DMR16:57029901
acctgattcaccccactcccttgcaaggcaaggaaggtctggggcccctggggtaggggattccactcctgacacctttgccacaatcttgcagcctgagcagcaacagcatctgcgtgtcaaccctactctgcttggcaagggtggcagtcacgtgtcctaccgtcaggatgcttcaggccaggtgagcagaaggaaagggatcttggccttatgggccttgagaaaagaggaggggaaagtgggatgggaaatggaggaggcccctcgtctgcaggataaatctgtgcataccctactgttttactcacagctttaccttcagaacctagctcaggcttggcacctggtacttggtatatattgaattaatggatggatgaaaagatggatgtatggatggatggctgaaaagatggatgggtggatgaaaagatggatggatgaatggatggctgaaaagatggatgggtggatgaaaagatggatggatggatggatggatggatggctgaaaagatggatgggtggatgaaaagatggatggatggatggatggatggatgaaaagatggatgggtggatgaaaagatggatggatggatggatggatggaaagattgatgggtggatgaaaagatgaatggatggatggatagatgaatggatggatggatagatggctagctgaaaagatggataggtgtgtgaaaagatggatggatggatggatggatggatggatggatggatggatggatggatgaaggaatgagtcaacaagtctacgaagcacaggcatagccaaaggaataattagctgtgtgttgccctccatggtgctgaaccaatatagccagttttgatcatggggtaggttaggtgtcatttttcttactcataaaaatttctattaaaaaaaattcagccgggctcagtggctcatgcctgtaattccaacactttggaaggccaaggcaagaggattacttgagctcag

SEQ ID NO: 2285 - DNA, 600 bp, Homo sapiens
  misc_feature (1)..(600): DMR16:58353501
cccacatatgagtgagaacacgcaatatctgtctttctgtgcctggcttatttcacttagcataacaacctccagtttcatccatgctgctgcaaatggctgaacagtattcttgtgtgtgtgtgtgtgtgtgtgtgtgtgtgtgtgtgtgcatgtatgtatcacattttgtctatccattcatccactgatgaactctgaggttgattccatatcttggctattgtcaatagtgctgcaataaacatgagggtgcaggtatccctttgatatactgatttcctttcctttgggtaaatgcccagtagtgggattgctggattttatggtagttcgattttttgtttcttaagaagttttcatagtgtcttctgtaatggctgtactaatttacattcctatgaacagtgtataagagttccctttcctctgcattctcaccagcatttgctatttttcgtcttcttgataatagccattctaactggggtgagctgttatctcatcgtggttttgatttgcatttctctgattattagtgatgtggagcatttttgcatagatatgttggccattcatatgtcttcttttgagaaatgt

SEQ ID NO: 2286 - DNA, 200 bp, Homo sapiens
  misc_feature (1)..(200): DMR16:60535101
gtctattattggtgtacaggaatgcttgtgatttttgcacattgattttttattctgagactttgctaacgttgcttatcagcttcaggagttttggggctgagacaatggagttttctatatatacaatcatgtcacctgcaaagagagataatatgacttcctctcttcctgtttgaatgtgctttctttctttctct

SEQ ID NO: 2287 - DNA, 1200 bp, Homo sapiens
  misc_feature (1)..(1200): DMR16:61463701
cacataaatgggcatatgacatcctgacagctgttgtcacttcagctggtcatctcttctcccaggctactttaacttacagattgattgaccatttctccctctctggctttacccatcatttctcactctcctgtccccaaatctggtaactttgtaatctggtttacctctttgcatctgacactatgtgtttccacttctttgggttgggccttctgtaatttactcgagtttaccttacataagattgaagtgtaccttacataaggttgggttgcccggggcaacccatcaattctgaagccaagtcctgaaggaacccccatcaaattaagaagctggctatgcatgctgcaaagagtaatacatcttttcatgcttttatctgacttttagtcagaacagacacacatcttcattgatctttaataaaatgagaccttcaaaaaaaatgaaaaattattttccatttctaccaaccagcagtgtattattttgtattgtaagctccataatttagaatactcaaataataggaatctatttcaataacaaattcatccagttattaggaaagacaaaagggatgcactttttaaataaagatgtgacaggattagaaaccaatagaaatcatcagaaatttgaagaaaaaaatgtattttcttctctcagttagcaattagacagctgtattttgcataagctaaaattgataccaggaatactgtgctcaagttgcttgagctagaaatagaattgaatacaagttagggtgaaaagattctccctgaatgcccataagaccctctcacccatatctggcccatgtttctatattcatggctaagtgaattttttccctttattgtaaactgcttgtctggctttgttttctttctttctttctttctttctttctttctttctttctttctttctttctttcttttctttctctctttctctttttctttctttctttcctttcctttctttctctttcccttccttcttccttatctttttctttctttcttccttttttcctcttcttttttgctctttctttcttcttttcttctttcttttcttctttgcttttaccttttccttaaataagacaaatttttaattgaccaaaaaaaaccaatgttagtatttaaagcaggaaaaatgaacaaggagatatataaa

SEQ ID NO: 2288 - DNA, 900 bp, Homo sapiens
  misc_feature (1)..(900): DMR16:62150101
ttgaacatctttcaaaaccagaacaattgcatctctctgattactcttctgtagtcatcttcctctggcgaaagctgggaaagattttctgattttaaagattaatttgattatattattaccatttggataatccatgatactcttcccatctcaagatcttttaacttccatcacatctacaaagtccctttagccacatcaggtaacaatttgcaggttcagggattagatcatggacatcttctgtgggcccgtgttctgcctcccacagctgctaaaacaagacaatgttttgggtaaccatttattttttttctcgcacatgtcagttttgatcccatttctctgtctttttgttgttgttgttgttgttgttttgaggcagggttttgctctgcctgtcacccagctggagtgcaatggtgcaattatggctcactgcagcctcgacctctccggctcaagcgatcctcccacttcagcctcccaagtacttgggattacaggcatgcaccaccatgccaggctaatttttaaatttaaaatttttaaaatttaaatttaaaattctaaaaatttaaaatttttaaagtttaaattttaaattttaaaaatttaaatttttaaattaaattttgtagagacagagtttcaccatgttgcccaggttgatcttgaactcctgagttcaagccatctttccttcttgcttcccaaagtgctgggattacaggcatgagccaccacacctggcctttaaaaaaaaaaaaaaaaaaaaaaaaaaaaaaaaaaaaaaagcttttttgaggtatattgatatacaagaaactgtatatatttgaagtatataatttaatgacttttgacatgtgtatacatctgtgaaactatcaacct

SEQ ID NO: 2289 - DNA, 700 bp, Homo sapiens
  misc_feature (1)..(700): DMR16:62797001
tggttatttgcgtaagaaaagcactgtgaagatccctgtcctgttctgttcccttccgttctaattactggtgcatgcagcccccagtcacatacctactgcttctcaatccatcacgactctctcacgtggacccccttagtgatgtgagcccttaaaagggacaggaattgctcacttggggagctcggttgttggagacgtgagtcttgccaaagctcccggccgaataaagcccttccttctttaactctgtatatgaggggttttgtctgcggcttgtcctgctacaggatggctgtagacagtgtgcgcattatccaaacataccaaggacaattttttggcaactgtcactttctcaatgcaatgaggcccactttacaaataaggaaattgatgctcagagaaaaggataatacttgcaaaaacaacaagttaggagccagatttaaacttcaatgtgcctgtttccaaattgtctttttgccattgttcaaaacacgatgctggctggaacattttgtggtgcaagaatatgctaaaaactaatgggatgggtgtggtataactaaagagtacagaagccagtcagagtttccaatggccacactgtggtgggaggggcaggaaacataagcaaggataaatgtaattcctgttttgcattattacccaaggaataataaatattcacaaa

SEQ ID NO: 2290 - DNA, 300 bp, Homo sapiens
  misc_feature (1)..(300): DMR16:63966201
ctgaggcttgataaaatatcagacatgtatgtataactagaaagtactaaagttgcgatttgagtaaagaatgtaaaatgataccataatttttatttttaaaacacaattttggccgggagcggtggctcacgcctgtaatcccagcactttggcaggccaaggcgggtggatcacgaggtcaggagatcgagaccatcctggctaacagggtgaaaccccgtctctactaaaagtataaaaaattagccaggcgtggtggtgggcgcctgtagtcccagctagtcgggaggctgaggc

SEQ ID NO: 2291 - DNA, 600 bp, Homo sapiens
  misc_feature (1)..(600): DMR16:64001601
acaggactacaagaaagcaagagtagctatactgatacctgacttaggctttaaaaaaccaaaaattcagtatagatagatagggaaattttattatgataaaggggtcactctatgataaagacaaaacaattataaacatatgagcttaaaaacagagcactgaaataaattgaaaacaaacataaatgaatgaagaaatagacaattcaacaatgatagttggagaattcaattctcactttaaataattgatagcacaactagaaagaaaatcagtaagtaaacaaaagacttatacaacactattagagaactagatctcacagacacgtataaaacactatccccaaataacagagtatttatttttctcaagtgtacattgaaacatctttaggacagacgatataataagccatacaagaattccacatttaaaataattgaaatcatgcaaagtatgtctctgaccacaatgggatgaattaaaaatcaaaagcctaaaaaaaaactgggtaacgtgcaaataaattaaagcattaataaatacccactgagaaaaaaaataaattttaaacaatcggaagatacggccag

SEQ ID NO: 2292 - DNA, 400 bp, Homo sapiens
  misc_feature (1)..(400): DMR16:66895801
tgtcctcccctgtcccagttccaataatggactacaccacctttatcttccactgccccaaatgacggctgtccgtctagtcagttccacccactacaccacagtcatcgtgaccatgtcactcctttgctccgaaccatggctccccctcaccctaaggaggaaagctcagactccctctccccagggtggcctctccagcctcctccatctgttcccagcagggtgggcatggctgtcacatgttcctagaacatgccaggcctttggccttgctgttccctccgctggaacacctaccactgcaccatccacctccacctgtcttgttcctgcgactcagcatgactctgctgaagcatcccctgccctgggaagacttcctggctttccaggcagt

SEQ ID NO: 2293 - DNA, 1600 bp, Homo sapiens
  misc_feature (1)..(1600): DMR16:67421201
ctggtatgtggagcttcttcctgtcctctgtgacgattctgcagctcctggaactggcaacatctgttttcaccctcaggcttcttcccacagggttctctttaacttgtgctgttccagctcctcccgacaacaccccctccccaacctggccaatttctatgaaaacttgagaccattttatagaagtcagccccttgggcaggacttgttcctagccagagctgcagccagtgattcgcaagggaggtctgcccaggatagaacagccaagggccacagggagaaaaaggccaattgtggttttccaggtgtgcacacacacatgtgagctgacttacagggctcctgggagctgccagaggtgactccacagggacaaagctggatcagcccaccctgggcctgaaccaacagatacgtccataattagagccagtgtgatcccagggttccgggcactcttcacctgtcccagggcaggttagtggttcaatcttcatggtgccagttataagatggtgaccttgggtaatttttttttttgaggcggcatcttgctttgtcacccaggctggagtgcagttgcacaatctcggctcactgcaacctccacctcccaggttcaagcaattctcctgcctcagcctcctgagtagctgagattacaggtgcccaccaccatgcctggctaatttttgtttttgtttgtttgcttgtttgtttttgttttgctttttttttttttttttttcctagtagagacagggtttcaccatgttggccaagctggtctccaactcctggcctcaagcgacccgcccgcctcagcctccaaaagtgctggggattacagacgtgagccactgcacccagccataaattcttcaactttaataatctcaatttgcttgtatttgaaatgggggtaacaatagctactgcctagggctgtgatgaggcctgaaaatgtggccatgcatatagagcacccaaagagtgctcgatgggtagtaatcactggtgcctcccatccagaccgtccttgtctttctaccaggaaatgatgctgtccgcatcatcaacgaatggaagtaaatttaattattaaattagactgggtgggagatgatcagccacagctctcgctctctgggcccacttcgtctgggtcacagtaccctctccaatgggccctggatgactcagcccatccacttggcgtgtcttcatggccaccagcatctcttgccctggctttctgactggctcttgatttccacgggggccctccctgtccccgtccccacccctatcagtccattctccttacagcctgtggctgtcttagaacaaaaacaaaatttaaaaaatccacgccaagctgattcttttacttcctgcttacaaccctcaacaacactccccactccttagggagaggtatttccatataccatgaaattggaatagaaacctcctcctcactgtggccaccgcagtctccaagaccttgcgtgccccctggctcaggctgaccacagctctgtctatcccacggcctttgcatttgaagctcacactacctggaaacttactt

SEQ ID NO: 2294 - DNA, 300 bp, Homo sapiens
  misc_feature (1)..(300): DMR16:67696301
ccgcgcccggccgggaatcttttttttttttttaaatgatctattacgtatctatgaccaacttagatgtctcctcttcaaaagctgtgtaggaatatgaggatgataattttgagccaatatgaagtgaaaaatatatataagtatcggtagcttaaaacaacagaatggactagaattttttttcttttttgagacagtctcgctccgtcacccaggctggagtgcagtggcgcgctcttggctcactgcaagctctgcctcctggattcacgccattctcctgcctcagcctcccga

SEQ ID NO: 2295 - DNA, 1700 bp, Homo sapiens
  misc_feature (1)..(1700): DMR16:68240501
tcaagtgatctgcctgcctcggcctcccaaagtgctgggattagaggcgtgagccactgcgcctgacctattttattttgttttattttattttaatttttttgagacagagtcttgctctgtcgcccaggctggagtgcagtggcacgatcttggctctctgcaacctccgcctcccgggttcaagcgattctcctgcctcagcctcctgagtagtgggattacaggcacgcaacaccacgcctagctaatttttgtatttctagtacagatagggtttcaccatgttggtcagcctggtctcgaactcctgacctcgtgatccgcccgcctctgcctcccaaagtgctgggattacaggcgtgagccaccacgccaggcttattttatttttatttatttttgagacagagtctcattctgtcacccaggctggagtgcaatggcacgatctcggctcactgcaacctccacctcccaggttcaagtgattcttgtgcctcagcctcctaagtagctgagattacaggcccacaccaccacgcctggctaattttttgtatttttagtagagacagggtttcgccacattgcgcaggctggtcttgaacttctgaactcaggcaatatgcccacctcggcctcccaaagtgctaggattacaggtgtgagccaccatgcccgggcttttattttatattttattttttaaaattttattgaaacggagtttccctctgtcacccaggctggagtgcagtggcatgatctctgttctgggccctttgcctccagggttctgttgtggctggatcagtgttaggcatctcggggctgcagggagactggctgcagaggaatgggggactgctgagccatgagctttagggagattccaccggcctctaaatggactcagctctggccaccaaatcagcccgaaagccctgagcttagtttggttgcctcaagcctgggatccacctagttcaggtaggggagcttggagcttaggccagcgagagggagtgcaaagggccaggtagcaggaggggcgaagggtgttggctgtgtgctcacccaaggaagatagcacaactagactggctcctaagtctctggatttattctgttgatgaaaagagtcaaactctgtaaaatatttggacactttttttttttttttgagacaagagtctcgttctgtcacccaggctagcatgcagtggcgcgatctcggctcgctgcaagctccgcctcccaggttcacgccattctcctgcctcagcctcccgagtagctgggactacaggcacctgccaccacgcctggctaatttttcgtatttttagtggagacagggtttcattgtgttagccaggatggtctcgatctcctgacctcatgatccgcccgcctcggcctcccaaagtgctgggattacaggtgtgagccaccatgcccagcctggacgctttttttggatggagtcttgctctgtctcccaggctggagtgcagtgacatgatcttggctcactgcaacctccgcctcccgggttcaagtgattctcctgcctcagcctcccgagtagctgggactacatgtgcccgccaccacggccagctaatttttctatttttatagagatgggtttcgccttattggctaggctagtctcaaactcctgacctcagggg

SEQ ID NO: 2296 - DNA, 1500 bp, Homo sapiens
  misc_feature (1)..(1500): DMR16:68355601
catctttatgggagaacgcacaccccttgtgactgcagtcagtgggagccaagccggggagcggtacctctgtctagctgccggcctgtctctgcagcccccaggcccccttctgttcgcagcgtgccctggacttcagggagagcagggaagctgagccccacccgctgtgggagtacccatgccgcagcctctccgagccctggcagatcctgacctttgacttccagcagccggtgcccctgcagcccctgtgtgccgagggcaccgtggagctcagaaggtgggtgcagagagggctggggggcagggaggggctgctgcttgcccttggagttctcacccccgtggtgagcacagctggcctgggagacgctgacacgtggagggggtattcgtcctccccacaaccttgcccttccctgtcagagtggccctgcgcgtgtggtggttcccacggtcctgtgtgtgccactggtggaggagccaggaagggctctgctccccctctacagctgaggctcccttgttggatcacagctcaggaagatgggagcttacttcctgtggtcaccgatgcaccattttcctgaaccctcctgggagctgaagcaggtcagggtcagcaagtgctgcttgcgtccagggacgggcagccctgtcctgctccggccctcaccccaccctcgcccgaggagtgacttctcctggaagcacctcccaactcggggcaggcagccaggcagggcgggcgccatcacctgagctcccagggttgctgtctggggcatcagaggggccttccggccttcagtgccaggctgtgcctcaagctcccccagaccctgcagccacaccggccctgccccatgtgtggcccggctgcagggctcgggttggctcaggtgggggcttggctgcggctcttctggctggggtttttctgaggaacgtttatgtaactgcagcactaggaactcccggcagggcaggaaggaagtggggaagaccacaggtttctggaaagccgcaggagctgcagctgttcccccgctgcctcttgtgtgactacttctgctgggcccccctctccttgacaggcccgggcagagccacgcagcggtgctatggatggagtaccacctgaccccggagtgcacgctcagcactggcctcctggagcctgcagaccccgaggtagtgcctgcgcaccgggcccagtgtgcgtgcagaccctgagagcaggcgccgcctggggaggcctccctgcccccatgctctgggtgtttctgtcacaagttcttcgggccagatgatgacccctcagtggtcctgggccatctggcccctgagcagcttctctctgctgcgagctgcctgggctggaggctggctaggaaggaggctcaggtgccagggagccctcaccatcttcctgctcttcttcctacaggggggctgctgctggaacccccactgcaagcaggccgtctacttctt

SEQ ID NO: 2297 - DNA, 900 bp, Homo sapiens
  misc_feature (1)..(900): DMR16:68669501
ccatgtaacagtggaaatatgccagaagacagggtagtagagtgagttgtacactctagtgggaagcagattttgtagacagcgggaagaggatttctagctcctggtggggtggcggggggggtgggcggtagcagctctcagagttttggggattaagtcttctgagtagtaggggagtcaatccattagcctccttctgggttacctggtgggagaggattggagtcattgagtctctccttaaaggaaataattgacagaattgtctggttagccctttactggctaaagatcttcccttaggaagagggctgttttaggattgagaaaagtggccaggcacagtggctcatgcctgtaatcccagcaccctgggaggccaaggtgggagggtcacttgtgcccaggagttctagaccagcctgggaaacagcaagaccctgtatctaccaaaaaaataaaagtgacctttagtcactcactttgggaggccaaggtgggtggatcacttgagtttgagaccagcctgaccaacatagtgaaaccctgtctctactaaaaatacaaaaaattagccgggcctggtggcgggcgcctgtagtcccagctactcgggaggctgaggcaggagaatgacgtgaacctagaaggcggagcttgcagtgagccgagattgcgccactgcactccagcctgggcaacagagcaagactctgtctcaaaaaaaaaaaaaaaaaaaaagaacatcattagtacttaagtagttcttgaatgaatgctgcattgacgaacctggctttagaacctgaccaccctgggttctcattctaattccaagctgttcgacctttggctagtcatctcaccgccaccacccctcacccccagccctagttt

SEQ ID NO: 2298 - DNA, 300 bp, Homo sapiens
  misc_feature (1)..(300): DMR16:69138801
actttatttacaaaaacaagcagtgggcctgatttggcctgtgggccacagtttggtgacccatcttctagaatagcaaatgtcctctgtgtccattagtaatacttatcctctgctaatcagattcttgcttcgtttttaatatatcttgggtgctctttttttttttttttttttttttttcctgagatggagtcttgctttgtcgcccaggctgaagtgctgtggcgtgattttggctcaatgtaacctctgcctcctgggttcaagcaattctcctgcctcagcctccctagtagc

SEQ ID NO: 2299 - DNA, 2000 bp, Homo sapiens
  misc_feature (1)..(2000): DMR16:70080601
gaagcagttcataaaacccattttgccagctcaggactaatgaaaaactatttttattacgtataattaacctaatttaggaaaaagaagcagacttacgggaaaggctagcactgagacaaggaagctcaaaaattgctctcctgagattactattaccagccccagtatagcatttgaaattgttattagaattcttgaacctagttgctcacatctagggctgagtttgtaagggttaaacaagttgtccgttagattcaacatgaatatttccagggttgctctaacttcagacattagatcagcttatttgataggctggaggtgtgttattgtacaaaatttggaatggtggctcgagaggaataagagattccatcccactgatactgtctctcagcttctcatatctactgcccttgttcggcattatcaaaacgtagtattccaaaagctgtttctgtatagttcacctttatatttatagtatcactaaaaaaagatttcatttaaatctctaaattttttttttcagaagattgctgccaagcttgtccccctcttgacttttgagtctttgtcttatttcacacactgagaacagttacctaattgagtcttaagattataaaatccagtataaaaacatcttacaattaaaaaatactctttttaagttaaaaaattatgtttcaaatttagagcttatcacgtttcatggcccaaaatagcacattgagtttttggcatcttctcgcctgcccatgccaatgaaagccacaccatatggtatgactgctgttactttaggaaacccacacacggcggagacattgccaggcatgaagctgaggcgctgctctcatatgcttatctttgtaagccaacatattgaccaggatatattaggattccagtacatcatggtcttctatcaattgagacttcgagctctttctccaacagctttaacatttggccacataatgaaaacacatgttctgaacatcacggactctcttactcaacttcaggaagaagcttttgaatgacagctgcaagaaaggaaagcacaatcaataagtattttagtgccccttaagttctagcacccgtccaccactgtgccctttctttttatattatttttattttagagatcttgctctgttgctcaggctggagtgcaatggtgtgatcatggctcattgcagcctcaactttccccagttcaagcagtcttttcctctcaacctcccaagtagctgggaatacgggtgctcaccaccacgcctggctaactttttttttcttttttttttctttttggcacagatgggattttgctatgttgcccaggctggtcttgaacacctgggcttgagtgatccccctgccttagcctcctacagtggtgggattacaggcgtgagccaccacgctcagccccttttcctgttgtttattttccattttatagaacagtcatttagttcattgtggacttcatccaaacttttctcaaggttataaaattactattaaggctttttaatataaaattagcaaattctcctgaaaataaaaggtgtacagattttgttcaccagctttgtctagtcatacttggagcaaatattgaacgtgctatgctagctgtgctaggcactatgtataaaaagatggagaagactggccaggcgcggcggctcacgcctgtaatctcggcaccttgggaagccgaggggggcggatcacgaggtcaggagatcaagaccatcctggctaacacagtgaaacctcgtctctactaaaaatacaagaagttagctgggcgtggtggcgggcgcctgtagtcctcaggaggctgaggcaggagaatggcgtgaacccaggaggcggagcttacagtgagctgagattgcatcactgcacttcagcctgggcaacagagcaagactccatatcaaaaaaaaagatggagaagacaaaattcc

SEQ ID NO: 2300 - DNA, 1700 bp, Homo sapiens
  misc_feature (1)..(1700): DMR16:70137601
agtgtgaatgtacccactgccactgaactgaatacttacaaatgggtaagatggtagccacgatgaaaagtttattttaaatttatgagaccagttctcttgagtgatttgtagaatggctctgaaaacagttacagaagaggagttagaaaaatgtttggagcaaaggagatgtggtcacgtaactgtataatctttaggtgacagaaaaaaacccattggatatttagagtatatttgtatgtgttttagtcttatttcttcatagatgaggcttataacttttttgaaacaagatcttactctcacccaggctggagtgcagtggcaccatcatagctcactgcagccgcaagttcctgggctcaagggatcatcccgcatcagactccagaagagctagaactaactgcaggcgtgtgccaccatacccagctcttttttttttttttttttttgaaacgaagttttgctcttgttgcccaggctggagtgcaatggcacaatctcggctcaccacaacctctgcctcccgggttcaggtgattctcctgcctcagcctcccgagtagctgggattacaggcatgtgccaccacgccggctaattttttttttttttttttttttttttttgagttggggtttcgctcttgttgcccaggctggagtgcaatggcgtgatctaggcttactgcaacctctgcctcccaggttcaagcaattctccttcctcagcctccgtagtagctgggattacaggcgtgtgccaccacactggctaattttgtatttttaatagagacagggtttctccacattggtcaggcttgtttcgaactcctgacctcaagtgatccgtctgcctcggcctcccaaagtgctgggattacaggtgtgagccacctggctcactttgaaacttttttttttctgtagagacggggtcttactatgttgcccaggctggtctcaaactcctgacttcaagcaatctcctgcctcagcctcccaaagttctgggattacaggcatcagccaatgtgtctggctggcttctatgttaaatacctcctagggaatcttatcatctggggtaaaatcctcatagtagtcttttgagagcagtacacagacccatgttcgtttcttccagaaaagttaaggaaagtgcccaaaactattcagctggtctatggcaatttaggatcttttgattctgtttgttctcgatttgtagaatattaattttctcaaatctcacacctgagccccaacacgtgccctctgtctatataggtaccttgccgaatggatggtacatggttatccctcagaaaacgtttgggaattggacctgaaacgttttggagccctccagagcagccgcacctttctgcgccaccgggtcatggaagtcatgcgtaagtgaagctttatcgcagttgctcctagttgcaggtatcttctcggtggcccgtgttgtcattcagaaggagcaaagttttcctcagttctttaacaagtgctttgagttgggcatttgatttgactgtttcaggcctgagttaaggggctttatgctcctcatgatatatacgtaacattttctttagtgcatcggaccttgtttcattctgagaacaagaaaatagaataggagttacagttggtacatagcagcttcataaatattctaag

SEQ ID NO: 2301 - DNA, 600 bp, Homo sapiens
  misc_feature (1)..(600): DMR16:71390801
ttttgggcctggcatggtggttcatgcctgtaattccaacactttgggaggccaaggtgggtggctcacctgaggtcaagagttcaagaccagtttggccaacatggtgaatcgccatctctattaaaaatacaaaaattaggctgggtgcggtggctcacacctgtaatcccagcacttgggaggctgaggtgggcggatcaaaaggtcaggagatcaagaccatcctggctaacacagtgaaaccccgtctctactaaaaatatgaaaaattagccaggcgtggtggcaggcgcctgtagtcccagctactcgggaggctgaggcaggagaatggcgtgaacccgggaggcgaagcttgcagtgagccgagatcgcaccactgcactccagcctgggcgacagagtgagactgcgtctcaaaaaaaaaaaaaaaaaaaaaaaaagcaaaaattagccaggtgtggtagcacgcacctgcaatcccagctacttgggaggctgaggcatgagaatcgcttgaacccgcgaggcagaggttgcagtgagccaagactgcaccactgcactccagcctgggcaacagactgagactctgtc

SEQ ID NO: 2302 - DNA, 1000 bp, Homo sapiens
  misc_feature (1)..(1000): DMR16:71693801
acaaagacttcccccaatttcttgacatctctgattttccagagaacagggacagaaaactttcctatcagctagcaaaatatatcatatatgtatattagtaaaaatctggccaggtgtagtggcttacaactgtaatcccagcactttgggaggcccgggcagttggatcacttgaggccaggagttcaagaccagtctggccaacatggcaaaatccccatctctactaaaaacacaacaattagctgggcgtggtagcaggcacctgtaatctcagctactcgggaggctgaggcaggagaatcgattgcaccagggaggtagaagctgcagtgagctgagatcatgccactgcactccaacctgggtgacagagcaatactgtctcaaaaataataaaataaaataaaataatttttaaaattgactggctggatcacctgaggtcaagagtttgagaccagcgtgaccaacatggtgaaatcccatctctactaaaatacaaaaattagctgggcatggtggcagacacctgtaatcccagctactcaggaggctgaggcaggagaattgcttgaacctgggaggccgagcttgcagtgagccgagatcatgccattgcactcctacctgggcaacagagcaagactccgtctcaaaaaataaataaaataaataaattgactaaacagtgactaaataaaaattttaaacttatgcacaataaaaagtaataaataaaataaaaagttacaggctggaaaaaaattgagtcacaaatatagtacccaaaagatatatattcagaatacatgcagaagtcctttaaatcaatatgaaaaaagagaaacagaaacatgtacaaaaatatcaatgagtagttcaaagaaactgaaagatccaataaaaatatgaaataattctcaatcacactagtaatcaggggaaaaaaatttaaacaaagagaccatcattttttaaatttttttttttattt

SEQ ID NO: 2303 - DNA, 2000 bp, Homo sapiens
  misc_feature (1)..(2000): DMR16:73713701
gcttactgtccacaaattccattgatctcaggctgtgactcaatccatatgctcacgctttgacaccagcacagcaagcgagcgatacaaatcctgttcaggctacaaacttattgattttatagatttcccccaaagttgtgataatgatatatcattgttaaatttggtagaacaaactgctttcccaatctgtcaatgcgagcatgaaaaccaattcacagccttgtttagaaggctttcgcatcagaagaataagtacagccagaggaagcagatcaccgatacccagcggctggcaccagcttgatgtatgatcccttcctcactgcccttttctgacccgcggcacactgggctgccagactcgtacttactggctacaattatccacagtgattcctccctaggatgctcagtattaattattaacaactgggagcatgctgcttgggtgacccacatcagtaggttttaaaagacaattttggtaattttcatacgctattcagatgcagttggatacattaggatcctgggcttattgactttaataggtcaatttttttttcctgcaattgttcgctctcccccatctttaggaagcaaggcagctgcttccagcagggggcagatgtcagacaacatttcccttggaaaggacacatctccattcccaagcacgggttaggggactccatttgcctcaacttcagatgctttctctacagagactggctagatctgggagtcctagcagcatggtaggattccactagctttatgtcttcctaaggtatttgtgtcctcaagtctccatccagcccagtgtcctccgaatcaccccatctcccgattctcttcctgcctgggtattcaaatgctttatggcatggagacgtctgcacgtgtgtgttaacatttcaacatgtgtgttagcatctattcccaacttcctgatcagctagaacatgctttccaccattactgtgtggtttccttgggtcatgaagactacgattatttttgatgttttccaaaatatccacttcccctcctttccaaaactttagtcttggtgtagtctcccttttgtctcatcatctgttccttgctgcttttcactttcctgctcagaaattcataccagctcctctcacatggtaatctattagtcctgctcccgctcatttaaacaaaaacaggttaacaaagcaactgcaaactatgctagagtctcatctcctcggataaagtccgggtctctctctctctgagaatcgttcattgccttttaaaaatgcttcctttttctctgccctccctacccccatgaagttgcagctacctctcatttgagcatatagcatctgctcccaatctgcctgctcgggtcaagctggatgactagaaattgtacttgtgtcacatgatggttctcggctaaaattctgactgccggcatccctgcagtttcatttcccatcacgtgcctgcttgacctcaacatgggttgagacctaggtttcttagagcctcatgccccacaggaaattgacctcactgaagagcatcaaagtgaagagcatccaaatgaaatcaagcatgctggcatagtatggctatgaacagacccagttgaccgtctcattcaattaccacacggacgtagacttgcgtatcttctttaatgccaacaataatttacatccttataacaacttcatgctggcaatggattttcatataacttcctcacaacctgtgagagagcttatggaggtgtcaccatcccattttatagatgaagacactgaggccgaaacttatgatcatcaagttagcaagtaccacagctggtcttttttttttttttttttttttttttttgagacagagtctcgctatgttgcccaggctggaatgcaatggtgcgatctcggctctctgcaacctctgcctccagggttcaagcaattctctgcctcagccccccaagt

SEQ ID NO: 2304 - DNA, 1400 bp, Homo sapiens
  misc_feature (1)..(1400): DMR16:73814401
cattctaaatttagaggaaaaagtaatcgtgggtctttcttcaaaatttaattttaaaacttgctccacaggtagacttttggtaaagatgcatttacatacaaattttaaaatacgtgatagttgtttaagaaagcttaacacaatcttacttacatagttcacaacttttttttttttttttgagatggagtttcgctcttgttgcccaggctggagtgcagtggcgcaatctcagctcacttcagcctctgcctcctgggttcaagtgattctcctgcctcagcctcctgagtagctgggattatgggcacccaccaccatgcctggctaatttttatatttttagtaaagacagggtttcaccatgttggccaggctggtctcaaactcctgaccttaggtgatgtgcccacctcggcctcccaaagtgctgggattacaggagtgagcctttcacacccagcccacttcacaacttcttaaaagtaaagctctcatcccacatatactgaaacactaggatttatcatgttccaatcaagtcaacttgctccaaaatctctcaagagatttttttaatcaccatacttaaaagtagggtgataatcacaaatattaggaaacatttctccaaatacaatgggaaatgctagataatgtgtaacttacggatgtaaacatgtgcaaagcacttaacccaaagcctagcttacagaacgcactcaacaagtagtagaataatgagaacgatgccaattataatagcatctattgttattattcagaatatctcatccagtttgacttatttctgcagtgaaacaaatcaccaggctgtgtcttttcaaagctcacacttccaaacagagtaggtgttccttctgatctaagcatacctgaatgtttttcaccaaggttcgtgactcctgtagccacatctatacttagtgtaaacctgaacttggcaacagaaaaccccatgcaggatatggcccctaggagaccatgagaagtgaccttccaacattcaagctacaggggaaatctttctcttaattcgagctacattgcacattatgtcagttctgcagaatttatccagaagaaccgatatgaaccgaaatctcatctactgtttacctattttctgtctttcctttttttttttttctttttggagacagtgtcactctgtccacccaggctggagcgtaatggcacgatctcagctcactgcaacctccatctccagggttcaagcaattctcctgcctcagcctctcgagtaagtgggactacaggcatgtgccaccacgcccggttaattttttttgtatttttactagagacaggttttcaccatgttggccaggctagtatcaaactcctgacctcag

SEQ ID NO: 2305 - DNA, 300 bp, Homo sapiens
  misc_feature (1)..(300): DMR16:75737601
gattttctagtttacttgtgtagaggtgtttatagtattctctgatggtagtttgtatttctgtgggatcagtggtgatatcccctttatcattttttattgcgtctatttgattcttctctcttttcttctttattagtcttgctagcagtctatcaattttgttgatcttttcaaaaaaccaggtcctggattcattgattttttgaaggtttttttgtgtctctatttccttcagttctgctctgatcttagttatttcttgccttctgctagcttttgaatgtgtttgctcttgct

SEQ ID NO: 2306 - DNA, 600 bp, Homo sapiens
  misc_feature (1)..(600): DMR16:76629401
cttcttggggataaactctgcttgattatgaataatgatacctttactgtgctgttgaatttgtttgctaggattttgttgaagattttttaaatctatgttaatcagaaatattctcctgttattttcttttcctagtgttcttgtttggctttggtatcggtatcagggtaatatgggtgttgtaaaatatgtttggaagtgttttattcccttcattttttggaagactttgagaaagattggtattaatttttacttaaatgtttggtagaattagccagtgaagtcatcaagtcctggaattttctttgatggaagacttttgattactgattcaatctccttactcattattagtctgttctgattttctgtttatgattcacttttagtagggcatatgtttctaggaatttggctatttttctaggttatccaatttgttggcatataattattcctagtaatttctaatgatcctttgtatttctgtggtatcaggtgtaatatattctctttcattttgaattctatgtatttgagtcttcttttttcttaatcttgatgaagttttgtcaatgtcatttatgtttcaaa

SEQ ID NO: 2307 - DNA, 900 bp, Homo sapiens
  misc_feature (1)..(900): DMR16:76895401
ctcttcccagataaatgaaagcagaatgcgttgctatcagacctgcctttcaagtaatatgtaaggaactatgtcaatctaaaaggagggacaccagaaaataattctcatctatacaaaaaattaaagattgccagcaaaggtaactataaatgatggtttaattgtatatttcttcttttttcatttaacttatttaaaaagtaattgcataaaataatttatatatgttatctatgtactgactatgtgtcggtatatgtatatgactatagtatgaccctctaacttaaaaaaatgtaatatatttgacaatgaccaaaatgagacaagttggagaaaagcttcattggaataagaaaattacgcaagaagataactcaaatccatgaataaatgaacagaactggaaaaagtaaataaggtttatagaacaaactctgtgtatatattatactctgtttttcccctcagctcctttaaaatgcatccaataactataactatagtaataactatcaaaatgtattgttgggtttgtaacatatatagatataatggcacaggtaatagcacaaaaaaaagaatagagccatccctgcaattaatttagtatacatatgaagtagattttgttaaaagatgtatattgtaagccctagaacagccactagtaaaataaccccgaattatttttaaacatttttaaaattaaaatgttatgctacacagaaaggggaacatcacacaccggggcctgttgtgggtcgggggagaggggagggatagcgttaggagatatacctagtgtaaatgacgacttaatgggtgcagcacaccaacatggcacgtgtatacatatgtaacaaacctgcacattgtacacatgtacctagaact

SEQ ID NO: 2308 - DNA, 1100 bp, Homo sapiens
  misc_feature (1)..(1100): DMR16:77769401
gcctgggtgacaagagcaagactctgtctaaaaaaaaaaaaaaagaaaagaaaaaggaaaaaagaaagaaagaaggaggatttgtataaaatgattatagagtgatttctaggagatagtgtcaggttaaaaataaagcaaagtgcaaaaaggaatatatagaatctaccttttgtgttagaagacgaaaaaaagacaaaatgcgtatacattcacacatctttccaaaaagaaacacaaaggaaaagccagaaaactatgaagttggctaccttcaagagctggctaggaggaacaagatggagtgggtacagaagggaggaatacttctcggagtatatcctttatatagttttgacttctggaagcatgttaatgctccacctgttcagaaaataaactaaaataaaccaggatgagaagagatgagtggtaaaatctattggtaacttagcgtcagtcagtcacttacacactggggatcaatgtgaaacaagactcgacatgtgtcaaacaatcctatactttgggtttgagatgtacattccaactcagaccaagcccagagccaatggctcccctatttctttggtctctcccagcaactgattagagataggccctttcatctaagtgtttaacgttatgccttagtattgcctattttgcagttagaaagttaaaagctattttctccctttggacattctctctactccctcctccactgcccttggtacctttaatcctttagattaccccactcttggaggaaggttgacccacttctcatttgttaattcattgaatttcttctgggtgggccactgggaacggggatgcaggttcaccttggaccctgccagtgaagcatttacaaggcggccagattgtccagtgccaagtataacgctccctctgtgctgtcccagaagagcctgcctctttcttcaccctgtgtcctattactagatgctattatcctaggctcagtacactctctgttctaggaagaggagcaagggcagaaataatccttctccaaaggttaatatttgttgggtattcaaaataagatagactataaactcttgtgggtt

SEQ ID NO: 2309 - DNA, 300 bp, Homo sapiens
  misc_feature (1)..(300): DMR16:78767501
tgtgtgtgtttgaataatactcctatgaacattgtaccaatatctattcagatctctgctttcgattcttctgcatgtatacctaggagtgaaattgctgcgtcgtttcgtatctgtgtgcttaaccttttgagaaactgccaaactgtcttcaacagcagccgcatcattttacattcccaccagcagtgcatcaggattctagttgctccacatctacccaatacttattttacttaaaaaaatagaatagccatctgagtgaagtgttacctccctgcagtgttgattcccatttcc

SEQ ID NO: 2310 - DNA, 1200 bp, Homo sapiens
  misc_feature (1)..(1200): DMR16:80111401
aaggtcctagaaactctatgcagcagcctaaagatcccatatatcactgatatttgcagatagacgttgcagatcacaagccaagagtaaagattgggacattgcaacctacactccctggctctccatgttgataggtcgaaaatcaagtcaccatcagtgggacgggtccctctgccctcttctaccccatgtggcttgttccttgagccaactcccttcatcttcctgtcctagtccactagtcacattcctactctctgctcagaggacagccttcattttggaatctggcattttgagaccttggtgacatagtactataatctgctcaaaagaaagtcaaggagactaaaagagataatcataatcttgcaatgttccaaacataatcaacttggaacattggaagaaggcttaataaaaagactactgataaaggtatgatcaaggtctaagtaaatcacaaggtttagcaccaaggaggcaccattactgttgttagacctgaaggaacaaggaaaggggggaggggttgtatgacacctggagggagagaaccacataatggatgctgtgatggtgagtaagaagcagcagcttctcttgacccgcagggagggagccagaagaataaacaccccaaccacacacttctctctttttcttgtttccttactgatgcttccattggttgaacctaactgagagccagacagtgaggattttgttgatgaatgctgccttccagagcagggaatggagtgcagaggggtgggttgccagggaggagcaaaggaaaaggaagccaccagcatactagtgccctctgttcaggttgactaagcctcatttttcctccaggtatgggtaaagggggtgctgaggccaggaggcttgtgctctgtttgtgccacagtccccttgcaggagtttattctcaatgggggctctcagctctagggcatcactgattgtttggtggtctgagaagcacctttatatcccatctccaagaggcagaatccattagctaattgcctggctcctatggagcttggccacaagatttgggaggtgccaggctttctcttccgcattgtaatctaaaacccataactcagtgcacccacttcctaaactctcaggaaataaggcctctaggccatatacaagtatcagtgctttcaacagcaggta

SEQ ID NO: 2311 - DNA, 2600 bp, Homo sapiens
  misc_feature (1)..(2600): DMR16:80942901
atctgatatctgttttccatttgactcttctgtttcctttcctttattgctctttacctgatttcttttgggttaactgaattttttttagtgttccattttattttctatattagcttcttacctatatctctttgaagattgtgggttttcgttgttgttttacagtgattgatctagggctaacaatataaacttttacttatcaaaagctatttataattaatgctgtaccatttcccacttcatacatagacaacaatgtaattcaacttatccactctccctcattctttgtacaactgttgccacatcacttacctctgcatagagtgtaaaccccatattgcagtgttgttattgtactttaaaaagtcaattgtctttcagaacattaccacaaaggaaaacataacaccgtatatttacccacttatttaccattcagttgctcttcattctttcctatagatccagatttctctctagaatcatttctcttatgcctgaatgatatcttttagcatttcttgtaactcaggtctgctagtagtgaatcctctcaaccacctttttagaaagatatgtccgctggatataaaattctgggttgagagttgtttcagctctttaaaggtattatttttttgtcttctgatctcatagtttctgatgaaaattccgcagtcattctaatccttgttccccagtaatgtacctttttgctccggctgctgtcaagatttttctctgcatttctgattgtcagcagtttgactacagatgagcctaggtgtagttctcttcgtatgcatcctgcttggggttcattgctactaacacctgtaagttgatgcttttcatcaaattaggatgaaagatttaagccattatttatttaaatgttttatttgccctaatctcactcttgtctccttccgggactctatatacatacagttatacattacacatgaatatatttatatatttttacatattacatttatttacatatttatatataagactatttgatattttcccacatatccctaaggctcagtttgttttcaaaaatctttggctgggcacagtggctcatgcctgtaatcccagcactttgagaggccaaggcaggtggattacctgaggtcaggagttcaagaccagcctggccaacatggagaaaccctgtctctactaaaaatacaaaaattagctgggcacggtggtgagcacttgtaataccagctactcgggaagctaaggcaggagaattgcttgaacccaggaggcggaggttgcagtgagctgagagtgtgccactgcactatggcctgtcgagcctgggcaaccaagtgagactctatctcaaaaacaaaacaaaacaaaacaaaacctggcacagtggcttatgcctgtaatcccagcactttgcgaggccgaggcgggtggatcacggggtcaggagatcaagaccgtcctggctaacacagtgaaaccccacctctactaaaaatacaaaaacttagccaagcgtggtggcacgcgcctgtagtcccagctacttgggaggctgaggcaggagaatcacttgaacccaggaggcagaggttgcagtgagacaagatcgtgccactgcactccagcctgggtgaccgagcgagactccgtttcaaaacaaacaaacaaacaagcaaacaaaaaaattgtatctctctgttctttagatgggataatttgtactattctgccttcaaattccccgaccttgtcctctgccatcttgaatctgctgttaaatacctccaggtattattcattttttacttgtcacttctagcatttgcattttttttgcagtctctatgtctttgttaagattacctctttttacttttttaattcattgaacatattataattgctgcatttaagcttttattttctaagtgcaacgctgggaccatcttgggcttagttttattgccttttttcttgcctaaaaatcaaacttttttgtttctttgtatgtctagtatttcttgtttgaaaaatgggcattgtgatgaacacatagtaggctatgtattgtatgtattaccatacacgtatctgaattttcttattttctcctgaaaggtattgattctgcacttcatttacgggctggtcatcttgaacttatataggtttatgagtggttactatggatctctggaaagcccagtgtttcccaggcccctcttacttgaggactcaacttctaaactctgccctcactgctaatcttatcaggagtttattcaggttttgttaggtaaggtacaaagtaggtcttactttagggcagtggttctcaacggaagcaattctgcacctagaggacatgtggcgatgtctttttagttgccgcacgttggtgggggagtgctactggcatctgatgagtggagccacggatgctgctaaatatcctacgatgcaaaggatgcccccactcaaaaaagaaatctcttgtccaaaatgcaatactacctgggagaagactctgctccttagatgtggcctttctggcacctcagctgggtaccagg

SEQ ID NO: 2312 - DNA, 1800 bp, Homo sapiens
  misc_feature (1)..(1800): DMR16:82266401
aaatttccagattgacaattggttggaagagttattatcaatagaaaaggaatatctgggttacataagaggttgtggagagcaaagttttctcatgtacatgaagcctccaggtagcaggcttcagagagaacagattgtaaatgtttcttatcagacttaaggtctatgttgatgttaaataatggtcggtttttcctgaattccaaaagggaggagggcatcatgaggcctgccccatccccactacccccacttgccgtcattgcctggaccagtttttcaggttaactttggagcaccctggcctagaggagggtgtcaattcagatggttgaggggggcttagaattttatttttggtttacagagggtgggctcggcccttctccaggaagctggcatctgagaggttgagggccatggccctagggtgcatttgaagggatggtaaccatgtgcagaaacactgcctctttagtgtcagattcttcctggacctagccattttcttcctttctagttctccatcatggatcccattaagtccccatcctccccagccccctctctatctatttctccccccagcagttgcttaaatgtggtaccctgatgggcaggaaagcaattgattagacttgaggtgacttgagttgtgttcagcaaaaatcctcactcttttgactgacttcaagtggcgtcatgacaaaatcaacctgaaaagacataattaataccctatacccttttattccaagttcctttcggttggaaagtactgccagctaaaatcattgtggtgagtcttgcctttcttctcaccagcctgtacatttgaatggagttagggactgtagcgtgtttatctctctattattccccattctgagtatagtgatagatgctcagtaaatattgattgattggctgattaatggaaagacttgggctctagactcagcttatatgatcttggacaagtcacttaacttcctctgagtccatttttccatttgtaagaggttgataattaattacacctgagtcttaggtcacactctccaggagtagctattacatgtggcttcaggtttgagtggcttattaaggaagtggtggaatgggggtagtaaggaaaggggaggaagcagagcaagggtgtgatctcaggaaaagtcctgcaggggccagctccagccttccagcgtgatcccacaggggaactctggaggcagctctagagttgttttcttctccttctccttctccttctccttcttctccttctccttcttctccttctccttcttctccttctccttctccctctccctctccctcctcttcgtcttcttcttcctcttcctcctcttcctcttcttcttcctcttcctcttcttcctcttcctcttattcttcctcttcctcctcttcctcttcttcttcctcttcctcttcttcttactcttcttcttcctcttcctcctcttcctcttcttcttcctcttcctcctcttcttcttcttcttcttcctcttcctcctcttcctcttcttcctcctcttcctcctcttcttttttgtttagagatagcatcttgctctgttgctcaggctggagtgcagtgacatgatcacagttcactgcaacctcaaactcctgggctcaaaggattctcctgcctcagcctcctgagtagttaggactacaggtgtgtgccatcacactggctaattttttaaaaaattttttatggagatggagtcttgttatgttgccaaggctagttttcaactc

SEQ ID NO: 2313 - DNA, 1000 bp, Homo sapiens
  misc_feature (1)..(1000): DMR16:83235901
taaaggattaaaatattttcaaatggatattgtgctgtaagttttgagttgttaccatttgactgcaattgaaactcatgatgctttatatagcttagatgattaattcagaaataatttgcatttaaatgcgtttaagatatttaacttatgattccaaatgtgcctattttaagcctggtagaagtactttagtctccaaagtatgtggacgctctacttctccctagtttgtggacctgaaaaggatttagatattaatatagaataacttttccaaactagttctgaaaacataagaactgagagatagccccctgcaacacacacgcacatgcacacacacacacacacacacacacataggttttgtgctgtcttgggagcatttaagatactctgcaaactacaattgcttccttaaaatgtacagtggacgtttgacatagtaaagatattttgaagatttgcaggccagaaacctgtttaagccaacatattacacacttttaagaaagaaaagctcttaataacatcctataagaaaatcttaaccattatagaagttactctttgaataatattgtgagaaaaaatttaattagtgaaaccctaaggaagttatcagcatggagatttgtgatggatgccaatgtgccttcctaaaatgctgcaaggctattctggaaaaacagttctggagacagattctggcattaactatctctgttaacatagtggtagctaggttcttcccacttctgcttgtttcagctaagtaaaatataagggagtccagtaattcatgaatggataaacaaattgtgatacatccttgcaatggaatattatacagccataaaaaggaatagagtaggttaagccatagaaacacaagttagatgagtggcaggggtgggaaggagggcctacttataggtctgggtttccctttgaagtcatggaaatgttttggaactagacagaggtggtggttcta

SEQ ID NO: 2314 - DNA, 900 bp, Homo sapiens
  misc_feature (1)..(900): DMR16:83300801
ttcttaagatttgtacattttactgtgtatgtgatgtttttagaacatcctgggaaggaaagctacatagcgctaaggtagttcgttaaagaagacgtggctgagagccaggaaacagggatttagatttcctcttcaccaagtggcacatgtgtcctgaaaatgttaaactgtgggcatttttaatattgcacatgttgaactgatacatataactttctggggttttttttttttttttttttttttgagacagagcctcactctgtggtccagactggagtgcagtggcacgatctcagctcactgcaacctctgcctccggggttcgagccattctcctgcctcagcctcccaagtagctgggactacaggcgcccaccaccacgcccggctaattttttgtatttttagtagagatggggtttcactgtgttagccaagatggtctcgatctcctgacctcatgatccgcccgcctcagcctcccaaagtgcagggattacaggcgtgagccaccgcacctggtcagggttttatttcagaaccgtttatttccccagtacatttatccactctacctccctctctgtgattttccattttcaggctgtgccgtgctggttttacccagtaccttgtttaatgatggagctcatcatttcggagtttttctctccgtgatgctgccacatgtgtcagggctgtgtggctgttacagaggaagggtctcgtggggagggagcagtgaaactggtggagcaagcaaggtcggaccgacagactatcttctcggatgtaagagaggttgttctagggaagccgtgttcctggcgctgggaggctttacgaagagtttttgaaatctccagcttgaacgttagtgtaccttattatggc

SEQ ID NO: 2315 - DNA, 3300 bp, Homo sapiens
  misc_feature (1)..(3300): DMR16:83425001
atgggaaattaaatccacagagctattccttttcccttagtggttctggcatgctatcacaccatagcatgcttacaacctcggtcaagaaagagctgtgatcccaccgtttgtccatcgagttctaagctatggtatttgtaaaaggtcattctgctctcccgacattaacctgaatggaacagctggaacgtaaattggaaggaggagtgatgattctccctttggccatttgatgacttgggaattaaatgggacccaatatgtcatctaacgttagttccagccagtgtttcagccacaggacatctcggaaaggtggtcatttggctcttgcctgaagcaatcgaggaaggagagcccagttctggaattagacaattattgttcttacccttgaaccagccacttacctgctgcgttcccactcttggccaggggccaattaatgaatgaaacaagctccctgcactcaggaggctcacagagaagatgatccagtttatgctaccgcatctccaccataactccccttttagctcattaactccctcaaaaatatccttctgctaattcctctcccttcccctctcttccactgttgcctttggagctttcactttatcctaaacttctttatgtctttagtcatctcctagaacacacatttcctcacctttagagaaacttgactctttcttcaactaatctgcagtgttcaaatatgaatacctttctgtctttccttctttctttctctttttctttcttcctttgtctctttcttcttcctcctttacttcctttctttttttctttctcccttccttccatttattcattcaacaattatttataagggacttaatatgtgcccagcactgttctaggcactacagatacagcattgaaccaccccaattaagcttgcattctactggggagaatgaaaataaaattaaaattaaaatgagatatatagtaaattaaattagaaatgcagtagggtttctttttaagtggaggtggtcctttctcctatcctcccaacttcttaactccaatgtttcaaagctaggaggagaaatcagtattcccagggaccctttggaagaacctttcttctttcaccctctttcatccattccttctctgaagctcatgccatctgattaatcacactatgttcactcctcccagcctctgggtttccaccctaatgcattgagattctagggctctggattctggttcagttttcctgtctcctttcagcatttgagtgatttctgcatccgatttgaagggtcagtttcttggttttcattattccaataatgtttctctccccctcatttgagaagccaactcataagactaaactctagtccttgctaatatgccaactactctaattccaatatttcccaccataaatctcctcctggaccataaccttttgtttctcccaattttctctctcatggaaacaactcccatggaaacaatcacacacacacacacacacacacacacacacacactcatgtggttacctttttgccagttttccagcctcctggactgaacagtctagaagagggatccaacatggactggaagaggggaatccaacatggactgctgtgcaccagcctacatcatagtctgcctacatggtgcttggcatgtagatagaatgagagatgctgaatgatagtcctcattctccctaagcccttagtgattatgagcccctcccacttgtcctaccaaacttaaacttcttattaacatgacccatctcttttctcctctcttgctgttaaggtgtgtggtgatcacagtaatggccccccaaatatgactttgtcctaattctcagaatctataaatatgtttctttcttttttttttttttttttttttttttttttttgaagacggagtctcgcttgctctgtcgcccaggctagagtgcagtggcgtgatctcggctcactgcaagctccgcctcccaggttcacgccattctcctgccttagcctcccaggtagctggtactacaggcgcccgccaccccgcctggctaatattttgtattttgggtagagacggggtttcaccgtggtctctatcttctgacctggtgatccgcctgcctcagcctcccaaagtgctgggattacaggtgtgagccaccgcgcccggcctaaatatgtttcttacatggtcaaagaaaccttctagatgtgattaagttaaggatcttgagatggagacagtgttattgactatctggatagacccaatagaatcagaagtgtccttacaagagggatagaggagggtcagagaaagagatgtggcaatggggacagcagttagagtgatgcagccctgagccaaggaatgtgggtagcctcaagaagctggaaaaggcaagaaacgaattctcttctggagcctcctgaaggtaccagccccactaacaccttgacctaacccccatgagactgatctccaacttctgacctctaaaactataaatcatcagagttgttttaagtcactaagatggtacagttagttactgcagctgcaagagactcatataaaataccagcaccactagataacacagcaagggagtgcagtgattatggtgccttgtgccttcaggattctcctccaccctcggcaggcctggtgctactaagcacctctgcacttatggtctgctgtcctgttccaccattctctttcccagcacatcaagaaccaaccacagagttgacaagaggccacttgtaacaatgtgagcttctgttcccctaatagtattaacaattacattcctgtgactcctttcagggccgtgaagatgttccttggacccaggcaaaggcagaactgctgacagctttggctgctccatgtcacctcacttgtgaatggcgacagaaaagccagggtgatctgtagctgatcctctggtcagttccactggctcaaattaaaattttagagaatcggtctctggtatatttcccctttgcagatgacacagagagggtcatttatgttcataagttggggcgaaagctccactggctagtagcagcatttgaatagggggaaatggcaccttttgactgctcatgtttattatgggaggggaaaaatgagttttattattgaacttcatgtgaccttccatgggatccaagagggattcaatgactgagaaacacaggaaaaacagcaggcagcaaaaacagtgaactagctcaagaaata

SEQ ID NO: 2316 - DNA, 3600 bp, Homo sapiens
  misc_feature (1)..(3600): DMR16:85626101
tggggacccagggcagcctgggggggtgtttttatttggaaaaaaaaaattaaggcacaagcaggctgcccccatgtgtctggagcaagaagacctctccccagggtctccccgccccctcccttgcctccacccccaagaaaaattgctttgtgccactgagcttggagcacgtggagggcagatatgataatgaatttatcatgaagccgcccaggctcctgcgatcacgtggtgcccgtgcagcctcagccgccagggtctgtagcagggtgacccgacctcgttagggccacggaagcttcgcccctttgggggagtggggatcgcgggggcgggcaccagtccccgagctgggggacgccctttatttgttcacaaacatttctttctgcggtaatgaaaaattaccaagaggggtgattagagaatccaggtccagattgtgtgtgcggggcctgaaagtgaaggcctgctgggcccagcctcacggggtgtaattaccccacggggggctgtcagggggaaggggcggattggtgcttgaaccgggacccagcagaaaattcacctcagctattagcttgtaattacagagcacagagggagcaggcctgaggtctggtgccggggaagagccgggatgaaaggaagcagtaattacgggatccgcgggaggccgggagggcggctggcacgctgattaataagcccctccagcctcgtggggagggggagcgaggaatgggacaccatatttaatggagtagagaggcctcccccctcgtttaaatcctgctgttggagcgtttggacagcaggcagaccggtttggggtctgttctgaagaactaagaacgagatgggttccggaaaatagcagctcgctgggccagccagccttgtccctctccactgggactttgcttccttttcttcttgccttttttttttttttttttttttttttttttttaaagcattgtgctgcttctgaccctattagaaacctagccagagaataggagaaagtattgattcaagaagcggtgctttgttacggggggcggggggtgggggcctcacccgggggcggtggtctttgcttccccagacctttcctgtctgtgaaatggtgggacctgagggttttgcggtgctgtgggctgctgcttcattctccgtttcctgccctctggcttctggcagaagcctctaggttctcagctctgccaggcagactgtctagaccaggtgggttctttctgaaagggtccagggagcagacagttgaggctcacatgaagaaggggtatgtcccctggcccctcagtttgagggtgcccagggccgaggggcctttaggtgtctggctgtggcagctttttttttcctgggggtgggggtcaaggtggcagctgacagtggcaggaagggttgtccagagcagcacgtgatgtaaataagagggtgggggcctcgcagacctggtccacctagacccctggctcgttttcgcctgctgagctgcacatgtcaagagagcttgtacagtgcggagacagcccccggccccccggccccccggccctcatccgtcacaggccttcacacggtggagcgtattcccagctgttaggataatgaatttacatgagctgataatgtagacaagaattcagtcaatgtccaggagcgcagaagttaataaatacctctctaatgagggcagcaggggggtgtgctctcccagggcctccctctccccgccatccctgtgtcccccacggacaccttggcacctgcactgacctcagccagagaacacctgcacgggaggaggcccgcatcggtctccctggggagggctgggggcttcgtgccgaggcctcgggggcagcagccttgaagtgatccccaccaggcctggaggggcaggaggcacgtgggccctggaggctgtgtccattcacagcaggcccagggggacccctccaaggatctcggggttccccggctcttggcctcctgtcctggcctcaagggagctgcgcccggctgctgcggcccccgccccgcctgcccagtgcacacatactgaggagcagcgctaattttagattccccctaatgaagccgctcatttggaattctattttaagtgacctgacatcagcagagccgcttcccaggctcacagctcctcaggagcctgcagctgacaccggggcagggatgctgcccgcaggggacccccagggacccagggagactgtacctggggctggagggggcccatggggcccggggagcagatattgggctttgtcagaggccggggtagggaggttgctgtcaggatgccagtgggctggtgatagtgacactgaggtagcctcagacccaggcattggagggagcaggcagagggcctccctggtcaccagggaagggctggggagctgtgggtgagggctcaggttcagactcctgcagggacaccccagttccctccacctctgccctgtggctggacagccccacgcttttgttggcggtgctgacttcgtgccgtcgagccgccatccctttgaatgtccgccttttaaaagcctggttcactgcagaaaaattagaacatacagagagagaaaaaggatgaaagtgaaagacatagctcttctcgttgccatctgaagacactgccagtagcctcaaggtgtgtgcgccatctggggtctggtctgggactcgcgccatggcctctgtgtaccactgatagggtttggatgtgtgtcccctccgaatctcatgtggaaatgtgtcctccagttttggaggtggggcccagtggcagtgattggatcatgggggtggatctctcatgaaggggttatcaccgtcaccttagtggtgagcacgctctcgcaagatctgggtgtttaaaagcctgggacctccccactcttgctccctctctcaccactggatgtgctggcttccctcgccttccgccatgattagaagcctcctgaggcctccccagaagcagatgccagcaccacgcttcctgtacaccccacagagtcaggagccaaaataagcctcttttctttatgaattacacagcctcgggtatttctttatagcaacacagacagcctagttcagccacccagcccgtgcctgtggctggtggtcatagcacatctgcccgggtggccagccagcctcatgaaggccacaggagagagaattggcatctgctcccagaccttcagggcgggtcacctggaggtgaaatgaccatacggtgccccacgttccccttttgcggtagcatgtggtgtggtttgcagggcatagtcagccacccagcctgcaccggagatcggcccctcctgcggccctggagcaggtcgagctgggccctggctggcttgtcacatgggcactgtgctgaggtcatctcagccctgctctgcactggacctgggctccaagcctgccttcgcctatctgggaaataggcccagtcccagctttctcatagggcggccaagatgtagagtggctggctctctgaggaatgtgggaaag

SEQ ID NO: 2317 - DNA, 1200 bp, Homo sapiens
  misc_feature (1)..(1200): DMR16:85972901
ctaccgcctctgtgactaccgcctctgtgaccgacgctggtactacgactgtagccattgttcctaccgcctctgtgactaccgcctctgtgaccgacgctggtactacgactgtagccattgttcctaccgcctctgtgactaccgcctctgtgaccgacgctggtactacgactgtagccattgttcctaccgcctctgtgactaccgcctctgtgaccgacgctggtactacgactgtagccattgttcctgccgcctctgtgactaccgcctctgtgaccgacgctggtactacgactgtagccattgttcctaccgcctctgtgactaccgcctctgtgaccgacgctggtactacgactgtagccattgttcctaccgcctctgtgactaccgcctctgtgaccgacgctggtactacgactgtagccattgttcctgccgcctctgtgactaccgcctctgtgaccgacgctggtactacgactgtagccattgttcctgccgcctctgtgactaccgcctctgtgaccgacgctggtactacgactgtagccattgttcctgccgcctctgtgactaccgcctctgtgaccgacgctggtactacgactgtagccattgttcctgccgcctctgtgactaccgcctctgtgaccgacgctggtactacgactgtagccattgttcctgccgcctctgtgactaccgcctctgtgaccgacgctggtactacgactgtagccattgttcctgccgcctctgtgactaccgcctctgtgaccgacgctggtactacgactgtagccattgttcctgccgcctctgtgactaccgcctctgtgaccgacgctggtactacgactgtagccattgttcctgccgcctctgtgactaccgcctctgtgaccgacgctggtactacgactgtagccattgttcctgccgcctctgtgactaccgcctctgtgaccgacgctggtactacgactgtagccattgttcctgccgcctctgtgactaccgcctctgtgaccgacgctggtactacgactgtagccattgttcctgccgcctctgtgactaccgcctctgtgaccgacgctggtactacgactgtagccattgttcctaccgcctctgtgactaccgcctctgtgaccgacgctggtactacgactgtagccattgttcctg

SEQ ID NO: 2318 - DNA, 1900 bp, Homo sapiens
  misc_feature (1)..(1900): DMR16:86653401
gctgacagctaagataaaaagccccttgcggtcgagtgttgggaatcatttttcagtgctgtgtgtgggaaattgagcatggaccatcaccggggtagttcagggagcctggagtcttgcaggctgcagtgtgggggccccgcctgccactttaaatcatccccgcatttccagcctgggcattgatccctcccgatgagcaacacaacgtttgaaacaaatttggagagaaacaagtaggaggtgactggcctattgtttctctctaatttcgtgtttcttaaattgccctaattttcttattccacccacttggataattcctggttttagtggtgacggaaatgaacaggggccagaatactacaagctattcccatgatgattccagctgagaccacaggccaaactgtggatgtgtcatgagaaaagccgggtcttgccccatcttcccggctgcagcagctcctgggaagcttggccctgctggtttcctcctggtcccacgacagggtggaggtgctcagattggttctttggcagggtctcaatttcctacctcggtttttttcctttctgaataatgggcaaattttgccttgtcccttctcataattctaaaattctctgcaataatttcaatatggctgtgaaacaccctggaactcgaaagccttaaagcagcaggaatagtcccacagaaggtcttcaaattcccagggactccaaggccacctgatcacgcatctacatttctctagttgccttggaagacattccctggtgtttggtttgggggaacatttcgggaagtatgtagagctgcaattcacaaatgttttggcctcaaaactcttttacaatcttaattattaggagcttttccctatgtgggttatatctattgatattcactggttgaaactttcagaacttttaatttaattgaaaacaacagtaaactcataaccttttgtgtctttttttgttttgttttttgagacggaattttgcactttcacccaggctggagtgcaatggcacaatctcggctcactgcaacctctgcccctggggttcaagcgattctcctgcctcagcctcccgagtagctgggagtacaggcgcccaccaccacgctcggctaatgtttgtatttttagtagagacggggtttcaccatattggccaggctggtctcaaactcctgactttttctttttttttttctgagacagttttgctctttttgcccaggctggagtgcagtggcgcaatcttggctcactgcaacctctgccgcccgggttcaagcgattcttctgcctcagcctcccaggtggctgggattacagatgcctgccaccacgcccggctaattttttgtatttttagtagagacggggcttcaccgtgttagccaggatggtctccatctcttgacctggtgatctgcccacctcggcctcccaaagtgctgggattacaagcgtgagccaccgcgcccagccactcctgaccttttgatctacctgcctcagcctcccaaagtgctgggattacaggcgtgagccaccgtgcccggcctttttattttttatttttttgatggagtcttgctctgtcctccaggttagagtgcaatggcgcaatctctgctcactgcaacctccgcctcatgggttcaagcgattctcctgcctcagcctccagagtagctgagactacaggcgcgcgccaccatgcctggctaattttcgtatttttggtagagacggggtttcaccatgttagccaggctggtctcaaacttctgacctgaagggatctgcctgccttggcctcccaaagcgctgggattccaggcgtgagcccctttactcggcctctgataacctaa

SEQ ID NO: 2319 - DNA, 400 bp, Homo sapiens
  misc_feature (1)..(400): DMR16:87112301
gtgatttttcagcaaaccttaaggggccaaggctcttggccacacaggtcaaatgtcagccccatgggtaaccagaaaactccaaggcaaaggattaacttgttcataaaaaatcagatcaacaggctaggtgcagtggctcatgtctgtaatcccagcactttgggaggccaaggcaggtggatcatttgaggtcaggagttcgagaccagcctggccaacatggtgaaaccccgtctctactaaaatacaaaaattagccaggcatggtgcccggtgcctgtaatctcagctactcaggaggctgaggcaggagaatcactcgaacccaggaagcagaggttgcagtgagccacgatcgcacctctgcactctagcctgagtgcgagagcaagactcc

SEQ ID NO: 2320 - DNA, 1300 bp, Homo sapiens
  misc_feature (1)..(1300): DMR16:87152201
gaaaccttcctgaggcctcaccagaagatgaacagatgccggtaccatgcttcctgtacagcctgcagaactgtgagctgatgaaacctcttttctgtataaattacccagcttttctttacagatttccagggggaaagtgccgtgccatgccgtgcgtgtgccgggtggatcggctttgtttctccagctcccactccttggcgcatattctctcctctgggccctcggcgaccccgcttttctgcacacattccctgtggctgccgtcacaaaccactgactctgcaccttaacataacacacttgtcctcccacccttctagagaccagaagtccaaaacgagcctcactgggctaaatcaaggcatgggcagggctggctccttctacgggctccagggagaatccctttccgcatctctctgggcttctagcacccgccacactccttggctcgtggccacttcactccagtccctgctcagccgtgcgtggcctcttctcttccgtttagaatctccctctccctccctctaataagaatgcttgtggcttcatttagggtccacctagaaaaatctcttcccctcaagaaccctaagcacctcgccaaggccctcttgtcctggaaatagcatgcacagtgtgggggctgggacctctctggggagccctctcgcactctccttcaccctgagcttcagcaagctcttccagagaaaggagctcatcaagtcactctcactgggcttaaaataaaacccctaggctgggatctgtgccgtcattaagaggctccaacttttggtccttggagaagactgaagtttggtcaaggtgcagtttggccgttgacaatggagcagagactgtgcctctctcagccacaccagggaggtgactgcttgacatcaaccctagggaagctgtggtgggacagactctgtctcttgaaggaaagcctctgggcaatttggaacccaggccttccgaaaccccatgcatgccctgggtcattccgcgggctctcccggcacagcccttgctttctaaaggcgggaaactgggcctcagaaaatctaagccctttgccctcctggatctcccttgggagccttgagggtggaaggcagagggggcgaagaaggagaggtttccacggcctggtggagcctgagaccctgaaaatgaaagggaccaggacccctttccaggaggaagcccaggttatttagagcccttcatcgccctcacgcagccctgctcctgcagtgcccagtgggaaggcgctgctctc

SEQ ID NO: 2321 - DNA, 1900 bp, Homo sapiens
  misc_feature (1)..(1900): DMR16:87355501
tagtaggtcatccacttaaatttgtccaaagagaaatgcaaccaatgtttaactgctgtttttcattttattttctaaatttttcaagttttctacaatgactttgtgtttttataacgacactcaaacttcagcatgaacaacagtatgtcaatcaaaacccacatatgataaagccgccagctcgaagcaactggcgctacatcacaataggaggctgcgcagcctggatgctcgagaggccagcccggcagcgtggggaggaggtctcttcctcgtgagctacatgaagcttccctccacctgcctcggggacaaaaggaatgtcccctgcccccagtgcaactctgaagactcgctaggccccagctgcgcggcctccccagaggctggtcagaattccatcccaggtccacagtgcacattccagagaaatagtgagacagacatgcgacatgaggagcctctcagtgcttgtccccttgtattgaaaagcccttgcccaatcacctgaggtcaggagttcaaaaccagcctggccaacatggtgaaaccctgtctctactaaaaatacaaaaattagccgggcgtggtggcaggcgcctggagtcccagctacttgggacgctgaggcacgagaactgcttgaacccgggaggcagaggctgtagtgagctgagatcacaccactgcactccagcctgggtgacagagtgagactccatctcaaaaaaaaaaaaaaagaaaagaaagaaagaaaagaaaagccagcacattcctgtcagcaccaaggagagactgttgtcaacgctcactaagtcgactgttccctcccacagctctcctcactgactgctcagaggaagggctggtcagtctagaacggcacaaatgtcttcaaacgttgcccacccctccttttccacctcggccccttccagccccgtgttccccgtccacagactcctgagaggtccacagactcctgagaggtcccctggctctggcctccactcagctagacagttcacacctcaacaaggcagtgctgttagcaggcgtgtaaagggttcagacaccaccctgaagcgtgctaaccaaatccaggcacctccgcaccaactacacgaaggtcccctcagtaaagcgggacccagttccccagctgcagtgatctgctgagatctggcaggacattaggtgaaattactctttctgctttcagttggtgtttttagaaatcgggcatttatgaaacttaagatgtaggtctgctcccaacagaccatgctgacccatgggccatcggggtggactgaaagcagtagtaggggctccacgagcctctagaaactgcaacacagcttttagggcaggtaggtgttttcaatctctttctggacagctgaaattcattgtctccatcaccactcaaccactctgagctaataaaaagtggaaacaggccaggtgcaatggctacacctgcaatcccaacactttgagaggccaaggtgggaggaatgaatgagcccaagagtacaagaccagcctgggcaacatagtgagacccgtcactacaaaaaactgaaaaattaaccaggcatggtggcacacgcctctagtcccagctactagggaggctgaggcaggaggatcgcttcagcccaggagttcaaggatacaatgagctgtaattgtgccactgcactccaacctgggcaacaagacagaccctgtctcaaaaaaaaaaagtggagacagcattaaattcctataactgtggcttagaaaaatttccagagctccatcaaaagaattcggttctttttttttttttttttttgagacagagtctcgctcttgtctcccaggctggagtgcaatggcgtgatctcgg

SEQ ID NO: 2322 - DNA, 700 bp, Homo sapiens
  misc_feature (1)..(700): DMR16:88359301
ggggctcggtatcctgcccgcatttgctattgtctgcttctgagcgtcccgggggcttggtatcctgcacgcatttgctattgtctgcttctgagtgtcccgcgggctcggtatcctgcccacatttgctattgtctgcttttgtgctctgtttccctgtgttttcatttgagtcatttggtttgtgtgggaaggagttttgatttacatttcactgctgcctaaagatgttgcgaactttcttaaacatcgttggctatcgggatagcctttttttgtgaagtgtctgctcgagtttcagtccacttatctaagatcatctctgtcttttttgtattgattttagaagtattgaaaaatactttctggataccagtcttttgttggaagaaaaataaaagcattgcaaatatattcttttactctggggcttacattatttcttctttcttcccccaacattggatctgaaaatcaaatatctagaaagctcgaaagaattctacagtgatgatccatatacctgccacctggattgtagaattaacattgaatagaccttatcatgtctctgtccatctttctatctatcagttcatcttattttttgatgcatttcaaagtaagttgcagacattaatacacattgctcaaaatacttcaacatgtacatcattaacagagaggtcaatatttgtat

SEQ ID NO: 2323 - DNA, 3600 bp, Homo sapiens
  misc_feature (1)..(3600): DMR16:89081801
gacgtcctctgcctctgcctccaggtcggcatcttcatgagccatggccttgtctccagctctgccctgcaacctgcagctgctccctgtggccccagagcaactgttctcgtggggtctcagggctctttcccagtcttagagatcattcagttcatatgtgggagctggaaaacagtggaacttatggagatggagactagaatgatggagatattcccagaggctgggaagggcggtggggagtaggggggtggtgaggggatggttaataggtacaaacataattacatggaaggaataagatcagatatttggtagcacaatagggtgactattgttaacaagaatttattgcatattttaaaataactgaaaagtggactggaatgctcctaacacaaagaaatgataaaggctcgaggtgacagtggccccgattaccctggtgtgatcaacacgtcacgtgttccccatagacacagataattatgtacccataggcattaaacattttattttttttaatttttatttgttttgagacagagtttcacgctttttgcacaggctggagtgcagtggcgtgatcttggctcactacaacctccacctcccaggttcaagtgactctcctgcctcagcctcccgagtagctggtattacaggcatccaccaccacgcccggctaattttgtaattttagtagaaattacaccttgttggccaggctggtcttgaactcctgacctcaggtgatctgcccacctcagcctcccaacgtgctgagattacaggcgtgagccaccgcgcccggctagaattaaagattttaaaagtcattcaggaccccaagagcttctgtttatgtcggtaatggttattgatacttaccaaattcaaaagaaattggagaacatttaaaaatatttatctaaaaatatttatcaagtcaatagtaaccacaataaactcactgaatgttaacataaacaacacgttttgttggttttttttttttttttttgagacggagtctcgctctatcacccaggctggagtgcagtggtgcgatctcggctcactgcaagctccgcctccctggttcacgccattctcctgcctcagcctcctgagtagctgcgactacaggtgtccgccaccgcgcccagctaattttttgtatttttagtagagacagggtttcactgtgttagccaggatggtctcgatctcctgacctcttgatctgcccgtctcagcctcccaaagtgctgggattacagatgtgagccaccgcacccggccaacgacatcttttatgaagatatctataaattccaaaacaaaacaactctggaaactagggcatgattttatgtgtccgctgtcactgtaacacttggctgcgtgggccagaggggaacctgtgtgcctccatatccagtctactgtgatatgttgttttgattgaactatatgaagaaaatctggcctcacaccgataatgtatagtggagtactgtaacagcctctttccccgggggaggggtaccgcaacagcctcttccctcccgggggaggggtaccgcaacagcctcttctcccccgggggaggggtaccgcaacagcctcttctcccccggggaggggtaccgcaacagcctctttccccaggggaggggtaccgcaacagcctcttctcccccgggggaggggtaccgcaacagcctcttctcccccggggaggggtaccgcaacagcctctttccccaggggaggggtaccgcaacagcctcttcccccgggggaggggtaccgcaacagcctcttccccccgggggaggggtaccgcaacagcctcttccccccgggggaggggtaccgcaacagcctcttcccccgggggaggggtaccgcaacagcctctttcccccgggggaggggtaccgcaacagcctcttctcccccgggggaggggtaccgcaacagcctcttcccccgggggaggggtaccgcaacagcctcttccccccgggggaggggtaccgcaacagcctcttccccccgggggaggggtaccgcaacagcctcttccccccgggggaggggtaccgcaacagcctcttcccccgggggaggggtaccgcaacagcctcttcccccgggggaggggtaccgcaacagcctctttcccccgggggaggggtaccgcaacagcctcttctcccccgggggaggggtaccgcaacagcctcttcccccgggggaggggtaccgcaacagcctctttccccgggggaggggtaccgcaacagcctcttccccccgggggaggggtaccgcaacagcctcttccccccgggggaggggtaccgcaacagcctcttcccccgggggaggggtaccgcaacagcctcttcccccgggggaggggtaccgcaacagcctctttcccccgggggaggggtaccgcaacagcctcttctcccccgggggaggggtaccgcaacagcctcttcccccgggggaggggtaccgcaacagcctctttccccgggggaggggtaccgcaacagcctctttccccgggggaggggtaccgcaacagcctcttcccccgggggaggggtattgtaacagccttttctcccgggggaggggtattgtaattttgccttttcagtaaccatgggaattctttgacaccaaaactggaagagtgccacttttttaaaggtttgctgaaccgtggtgtctaaaaccaaatctgagctttccctgctgcacgttaaagctgttctcttttgcactctgaaccggtcttttaccaccacacgtgattccgccacaccccacatcggtcatgtgagaaacgtgggttcactgagctgcgtgtgcacacactgacgggttgtgttgtgtaaaaattcacatgaattaataacgatcactgatatcagcaaattctgtaagtattgggcagctgttgagttcacagaggtgaacatgcttatctcagtctcttaactttttcttgaaagtcaaatcgtaccacaggaggacaaatacatttggctgtttttctggaactgtcaggctcactccgttctgccaaacacccgagtctgggtcgctgtcctccatctgtctgtggttctttccagtcaaaatggccatgaacagcagctgattctgacaggggcttgggccttacccaggacaagcctcgtgcctccgaacgcagcagcagtgggtggcgtgtgccgcccgtgatgggatttgacgtgaacagccttgttgctgctccatcaagggcattcttaggtggagctggccctcccccgactgcgggctgaggacacagcccctgggggtggccgtttggggccgcagcctcacagggtgaaggcagcagcggtgttacccacatgtcttctgtacagtctgtgcaaatgtcaacacacaggaaacacgggcagcatcttcatatcattatgaaaatacttttgaactcatggagccgggaaagggccctggggcccctggggcgtgggcagcactcgagatgcgttggcagaggacagagctcacagcccc

SEQ ID NO: 2324 - DNA, 400 bp, Homo sapiens
  misc_feature (1)..(400): DMR16:89097601
tggggccgccctggtttgctgctttctgaagctggcacagcccacgtgccgatctcgtgtcttgtgtctggtgaagcccagttgttttcttgccattctctgggtttctctatggtagcagagtccaggtgtgtgggcggaccagccactgccctgcctctgaacagctgtggagggcttctagaacatgggtgcctcgcgtcaggagatgatgtggcctgcaggactgaccgtttggtaggattcagagaagactcacacaggacgtccaagcagcccgcggagctgtgctgaggttcagggccctgcgtggctcgttttcctcctgcctgggccagaggcaggagatccctcagctggctgggacaggggacttcattaagagccccaggctacctgg

SEQ ID NO: 2325 - DNA, 4400 bp, Homo sapiens
  misc_feature (1)..(4400): DMR16:90039801
gctggctccaaggccgtgctccagatccaccatttgtggggcggacagcacatgtgatgccaggatctggggctggccaagggagcatatcctccaaggggccccacctgcaagctcggcctgctggatgccctggatctcaaatctcacctgagcccacagccctcactcgggcaagactggcctcggccacccatgaagcagctttcagggtggggctgcttcagctcttaccaggacacttatggcttccagagacaccttcctgagagaagggcttatgctgatgtgttcctcctgccttccactgcgtggatggctctacaaagggccagggcgcaggcagtgtggacaacacactgaccccggtgctgtgggagtgggcactgttgggaggcagcgtgttccaggcaggtgcagaggtgggaggcagcatcttcccagcgagatgtccccaggtgaggggcctcatcgcccacccccagcgctgtccctacaggtgcagcaggagcgggacgagctctatcggaagttcaccgcagccatccaggaggtgcagcagaagacagggttcaagaacctcgtgctagaacgcaagctgcaggctctgagcgccgctgtggagaagaaggaggtgcagttcaacgaggtcctggctgcctctaacctggaccctgcagccctgacgctggtgtcccgcaagctggaggtaggccctagacaggctcctgaccccagtgggcggcctcatccctgtggcaagagtcttcagttctgtgctgctcctcggataggcacagagacccctcggtcggccactgaggaggggcattcatgggtttcctgtggccagtttcgggccagttgggaactgtggaagggctgggcaggggaaccagatcagggcccactctgctattgatggggagcacagggctggagggggctggttggggccagcacagaatggggacgggcagagggttggagagccgccaggaggctgagtccacaggtggggctgggaggggccgaggtgacttggtgtttgcacatgggggaacgacgggtcccggcccagtgggcggtggtgcctgtgggaccctggtcatctgggatggcctggctctcagggcctgaggtagtgaggctgtataggaggggcctcacctgggccagaggcactgtggccccgggactgaaaactcatctttgtttgctcagcactgggcccagtgagcacaggcaggtgagggagtgagggtcccactgttgggaggtgggggaggcgtgtttccagctcctggctgagggctgcacccagcctgctgctaagccaccgaaatgagggtgaagagagcagtcgtggcctgtgagggtcattgcagctgcgcccacgcgccagggtgaggatggaggatggagctaaatgtgggtcaacccctcctttcctggtcattgttacctcgacttctaagtgaggaatcttctggggaaatgacagaggcccccgcagggacactgtttgctgctggccaggtgtgagggggctgctgtgtcagtgggcagcagggacggctctaaagccaggctgggcccagcagtgccccacaggcaggagcccaagaagtccctgcctcgccacgtggtgagacccttgcccacatctgggcggggccagcgctgctgaagactacttttttctgttacaaaaaagtgggatagccgggcgcggtggctcacgcctgtaatcccagcactttgggaggctgaggtgggcagatcacgagtttgggagttcaagaccagcctggccaagatggtgaaaccccgtctctactaaaaatacaaaaattagctgggcttggtggcgggtgtaatcccagctatttgggaggctgaggcagagaattcctggcacctgggaggcggaggttgcggtgagcctagatcgcgccactgcactccagcctgggcaacggggcgagactccatctcagaaaaaaaagtgagatagtacattcacaagcctcaagaaatttaagcaatatgtaggtggtgtttagtgaccagtctccacagtgtggctgcacgctgcctgccctcacctcatctgcatttcttgtggtctggactgctctttgagttttttcttgagacggtgtcttgctctgtcacccagactggagtgcagtggctcaatctcggcgcactgcaacctccgtttcccaggttcaagcaattctcatgcctcagcctcctgagtagctgggattacacaggtgtgagccaccgtgcccggctacttttcgtatagtagagacggggtttcgccacgttggccaggctggtctcaaactcctgacctcaagtgatctgccctccttggcctcccacactgctgggatcacaggtgtgagcggcagtgcctggcctggactgttgctggagaggcaggttgtgcaagctcccagttctctgcttcttccttgttttctctccacccttggagacctttttctgctgacaaccctgtgtggatggatgcatccatcaaaccaggctgctattcgctggatctctcagaacgcccactggagtccccaggccgctcccgttgcctcggccaaaagatgagtctcaaactcccatcacctctctctcctcaggatgttcttgagtcgaagaacagcaccatcaaggacctgcagtatgagctggcccaggtctgtaaggtacggctgtgccctgccctccctcaggggcaccccctcggtgcccagactgttctaaatgcagacggtctctgaggaccccacctgtgcccacttcgtacctcgtttgacaaggcagctgtcactgtccccacgtgagggtgcagtcatagccgagagcatctggattctgtgtggtctggggcagtgcactgctgtctaggccatgtctctgctgggatgggtgtagggggggacctggacgcttccctggtcagccccttcccctgggcagggagtcagaaggtgctgtgcccaccggggaaggaaacagacgtcattcaacaggggaagggagggcgtgaagaacctgagtgggaaacacccagccagggcccagagccctcccagaccacagctctgccctgagtgtccctgccctctgcctccgtctcgtcatttgtggaataggaatagtgacagcctctccctgtcgtgctacctgagccaacgcagtgaaggtgcttggagctgtgtcccacacgggaaatgactgataagcctttggctttatccttctgcaccgtgatgctcacgctgcccctccatggagctgcactcagctctggtggtcctgagcgtggggaccctcagctccctgacactgccctgtctccacaggcccataacgacctgctgcgcacgtatgaggcaaagctgctggccttcgggatccctctggacaacgtgggcttcaagcccttggaaacagctgtgatcggacagacactgggccagggccccgcgggactggtgggcaccccgacgtagctgcccccctggggggccacagcccagagaaccagcctaggaacactcgggatgacaccccttatcacaccaaggacagcaagttttttagattttatcatcagcaaatgaaagcttttcacatgttcttgccatcctctttcctggctctgtggaggagaaccacctgcaggaccctcacccatggtgtccctgtcgctcccttccctgggtgccgcacgtccagcctgtgtccaggcctactccctggtctcacctccgaccacagtcggcggcaccttctcagagtgccccgcactcacctgggggttggggcagtgccgcgctgtgctgcctgtcttcgcgccactgttgtcccaccgaatggacagctttgcaggtgctggcactaacttcattgacacctgagtcacagctgcccagtgggattctccagggggccgggacttccctaggaagtggtgagccaatgctccctgatgagcacaaagcccgctctgttgagggctgggtgggtgcagccagcgtgcgggaacgggcaggcagcctcccgctgccagtcttcgctctaactccctcggtaggtgatgtaggaccaggggcacgtggaacttctgggccttgctggtgatggttaaaacaacctgagatggagaggccaggagagagtataaggggatagcagcaaaccacctatctggccccaacacacctgagagaattcagcagcccagactgagggtctgggatggggtgaaccttccgcaccagagggacactccacagaagccacagcccagtaagtcaggcgcttctgcggcggctccagtgtggggtgaggcagtgaggttaggc

SEQ ID NO: 2326 - DNA, 6300 bp, Homo sapiens
  misc_feature (1)..(6300): DMR17:121701
actcacattcaggttcctcactattacagtgagaagttacagataaaaaatagggaagcctagaatgatctctgtcataatgagtcagaatatatatatacaacgtaagtataaactcacattcaggttcctcactattacagcgagaagttacagataaaaaatagggaagcctagaatgatctctgtcataatgagtcagaatatatatatacaacgtaagtataaactcacattcaggttcctcactattacagtgagaagttacagataaaatatagggaagcctagaatgatctctgtcataatgagtcagaatatatatatacaacgtaagtataaactcacattcaggttcctcactattacagcgagaagttacagataaaaaatagggaagcctagaatgatctctgtcataatgagtcagaatatatatatacaacgtaagtataaactcacattcaggttcctcactattacagcgagaagttacagataaaaaatagggaagcctagaatgatctctgtcataatgagtcagaatatatatatacaacgtaagtataaactcacattcaggttcctcactattacagcgagaagttacagataaaaaatagggaagcctagaatgatctctgtcataatgagtcagaatatatatatacaacgtaagtataaactcacattcaggttcctcactattacagcgagaagttacagataaaaaaattcaggttcctcattattacagtgagaagttacagataaaaaatagggaagcctagaatgatctctgtcataatgagtcagaatatatatagacaacgtaagtataaactcacattcaggttcctcactattacagtgagaagttacagataaaaaatagggaagcctagaatgatctctgtcataatgagtcagaatatatatatacaacgtaagtataaactcacattcaggttcctcactattacagcgagaagttacagataaaaaatagggaagcctagaatgatctctgtcataatgagtcagaatatatatatacaacgtaagtataaactcacattcaggttcctcactattacagtgagaagttacagataaaatatagggaagcctagaatgatctctgtcataatgagtcagaatatatatatacaacgtaagtataaactcacattcaggttcctcactattacagcgagaagttacagataaaaaatagggaagcctagaatgatctctgtcataatgagtcagaatatatatatacaacgtaagtataaactcacattcaggttcctcactattacagtgagaagttacagataaaaaatagggaagcctagaatgatctcggtcataatgagtcagaatatatatatacaacgtaagtataaactcacattcaggttcctcactattacagtgagaagttacagataaaaaatagggaagcctagaatgatctctgtcataatgagtcagaatatatatatacaacgtaagtataaactcacattcaggttcctcactattacagtgagaagttacagataaaaaatagggaagcctagaatgatctcggtcataatgagtcagaatgtatatatacaacgtaagtataaactcacattcaggttcctcattattacagcgagaagttacagataaaaaatagggaagcctagaatgatctctgtcataatgagtcagaatatatatatacaacgtaagtataaactcacattcaggttcctcactattacagcgagaagttacagctaaaaaatagggaagcctagaatggtctctgtcataatgagtcagaatatatatatacaacgtaagtataaactcccattcaggttcctcactattacagcgagaagttacagataaaaaatagggaagcctagaatgatctcggtcataatgagtcagaatgtatatatacaacgtaagtataaactcatattcaggttcctcattattacagcgagaagttagagataaaaaatagggaagcctagaatgatctctgtcataatgagtcagaatatatatatacaacgtaagtataaactcacattcaggttcctcactattacagcgagaagttacagataaaaaatagggaagcctagaatggtctctgtcataatgagtcagaatatatatatacaacgtaagtataaactcacattcaggttcctcactattacagcgagaagttacagataaaaaatagggaagcctagaatgatctcggtcataatgagtcagaatatatatatacaacgtaagtataaactcacattcaggttcctcactattacagcgagaagttacagataaaaaatagggaagcctagaatgatctcggtcataatgagtcagaatatatatatacaacgtaagtataaactcacattcaggttcctcactattacagtgagaagttacagataaaaaatagggaagcctagaatgatctcggtcataatgagtcagaatgtatatatacaacgtaagtataaactcacattcaggttcctcattattacagcgagaagttacagataaaaaatagggaagcctagaatgatctctgtcataatgagtcagaatatatatatacaacgtaagtataaactcacattcaggttcctcactattacagcgagaagttacagctaaaaaatagggaagcctagaatggtctctgtcataatgagtcagaatatatatatacaacgtaagtataaactcccattcaggttcctcactattacagcgagaagttacagataaaaaatagggaagcctagaatgatctcggtcataatgagtcagaatgtatatatacaacgtaagtataaactcatattcaggttcctcattattagagcgagaagttagagataaaaaatagggaagcctagaatgatctctgtcataatgagtcagaatatatatatacaacgtaagtataaactcacattcaggttcctcactattacagcgagaagttacagataaaaaatagggaagcctagaatggtctctgtcataatgagtcagaatatatatatacaacgtaagtataaactcacattcaggttcctcactattacagcgagaagttacagataaaaaatagggaagcctagaatgatctcggtcataatgagtcagaatatatatatacaacgtaagtataaactcacattcaggttcctcactattacagcgagaagttacagataaaaaatagggaagcctagaatgatctcggtcataatgagtcagaatatatatatacaacgtgagtataaactcacattcaggttcctcactattacagcgagaagttacagataaaaaatagggaagcctagaatgatctcggtcataatgagtcagaatatatatatacaacgtaagtataaactcacattcaggttcctcactattacagcgagaagttacagataaaaaatagggaagcctagaatgatctctgtcataatgagtcagaatatatatatacaacgtaagtataaactcacattcaggttcctcactattacagcgagaagttacagataaaaaatagggaagcctagaatgatctcggtcataatgagtcagaatatatatatacaacgtaagtataaactcacattcaggttcctcactattacagcgagaagttacagataaaaaatagggaagcctagaatgatctctgtcataatgagtcagaatatatatatacaacgtaagtataaactcacattcaggttcctcactattacagcgagaagttacagataaaaaatagggaagcctagaatgatctcggtcataatgagtcagaatatatatatacaacgtaagtataaactcacattcaggttcctcactattacagtgagaagttacagataaaaaatagggaagcctagaatgatctcggtcataatgagtcagaatgtatatatacaacgtaagtataaactcacattcaggttcctcattattacagcgagaagttacagataaaaaatagggaagcctagaatgatctctgtcataatgagtcagaatatatatatacaacgtaagtataaactcacattcaggttcctcactattacagcgagaagttacagataaaaaatagggaagcctagaatggtctctgtcataatgagtcagaatatatatatacaacgtaagtataaactcacattcaggttcctcactattacagcgagaagttacagataaaaaatagggaagcctagaatgatctctgtcataatgagtcagaatatatatacacaacgtaagtataaactcacattcaggttcctcactattacagcgagaagttacagataaaaaatagggtagcctagaatgatctctgtcataatgagtcagaatatatatatacaacgtaagtataaactcacattcaggttcctcactattacagcgagaagttacagataaaaaatagggaagcctagaatgatctctgtcataatgagtcagaatatatataaacaacgtaagtataaactcacattcaggttcctcactattacagcgagaagttacagataaaaaatagggaagcctagaatgatctctgtcataatgagtcagaatatatatatgcaacgtaagtataaactcacattcaggttcctcactattacagcgagaagttacagataaaaaatagggaagcctagaatgatctctgtcataatgagtcagaatatatatatacaacgtaagtataaactcacattcaggttcctcactattacagcgagaagttacagataaaaaatagggaagcctagaatgatctctgtcataatgagtcagaatatatatatacaacgtaagtataaactcacattcaggttcctcactattacagcgagaagttacacataaaaaatagggaagcctagaatgatctcggtcataatgagtcagaatatatatatacaacgtaagtataaactcacattcaggttcctcactattacagcgagaagttacagataaaaaatagggaagcctagaatgatctctgtcataatgagtcagaatatatatatacaacgtaagtataaactcacattcaggttcctcactattacagcgagaagttacagataaaaaatagggaagcctagaatgatctctgtcataatgagtcagaatatatatatacaacgtgagtataaactcacattcaggctcctcactattacagcgagaagttacagataaaaaatagggaagcctagaatgatctcggtcataatgagtcagaatatatatatacaacgtaagtataaactcacattcaggttcctcactattacagcgagaagttacagataaaaaatagggaagcctagaatgatctctgtcataatgagtcagaatatatatatacaacataagtataaactcacattcaggttcctcactattacagcgagaagttacagataaaaaatagggaagcctagaatgatctctgtcataatgagtcagaatatatatatacaacgtaagtataaactcacattcaggttcctcactattacagcgagaagttacagataaaaaatagggaagcctagaatgatctctgtcataatgagtcagaatatatatatacaacgtaagtataaactcacattcaggttcctcactattacagcgagaagttacagataaaaaatagggaagcctagaatgatctctgtcataatgagtcagaatatatatatgcaacgtaagtataaactcacattcaggttcctcactattacagcgagaagttacagataaaaaatagggaagcctagaatgatctctgtcataatgagtcagaatatatatatacaacgtaagtataaactcacattcaggttcctcactattacagcgagaagttacagataaaaaatagggaagcctagaatgatctctgtcataatgagtcagaatatatatatacaacgtaagtataaactcacattcaggttcctcactattacagcgagaagttacagataaaaaatagggaagcctagaatgatctctgtcataatgagtcagaatatatatatacaacgtaagtataaactcacattcaggttcctcactattacagcgagaagttacagataaaaaatagggaagcctagaatgatctcggtcataatgagtcagaatatatatata

SEQ ID NO: 2327 - DNA, 1600 bp, Homo sapiens
  misc_feature (1)..(1600): DMR17:505901
cagggtcaggacagcggttgagatggaagctgactttctagaagagcaccggtgaccctcaagagcggggtcaggacagtggttgagatggaagctgactttgtagaagagcattggtgaccttcgagatcagggtcaggacagcggttgagatggaagctgactttctagaagagcattggtgaccttcgagagcagggtcaggacagcggttgagatggaagctgactttctagaagagcattggtgaccttcgagagcagggtcaggacggtggttgagatggaagctgactttctagaagagcattggtgaccttcgagagcagggtcaggacagcggttgagatggaagctgactttctagaagagcaccggtgacctttgagagcggggtcaggacagtggttgagatggaagctgactttgtagaagagcattggtgaccttcgagagcagggtcaggacagtggttgagatggaagctgactttctagaagagcaccggtgaccctcaagagcggggtcaggacagtggttgagatggaagctgactttctagaagagcaccggtgaccctcaagagcggggtcaggacagtggttgagatggaagctgactttgtagaagagcattggtgaccttcaagatcagggtcaggacagcggttgagatggaagctgactttctagaagagcaccggtgaccctcaagagcggggtcaggacagtggttgagatggaagctgactttgtagaagagcattggtgaccttcgagatcagggtcaggacagcggttgagatggaagctgactttctagaagagcattggtgaccttcgagagcagggtcaggacagcggttgagatggaagctgactttctagaagagcattggtgaccttcgagagcagggtcaggacggtggttgagatggaagctgactttctagaagagcattggtgaccttcgaaagcagggtcaggacagcggttgagatggaagctgactttctagaagagcaccggtgacctttgagagcggggtcaggacagtggttgagatggaagctgactttgtagaagagcattggtgaccttcgagagcagggtcaggacagtggttgagatggaagctgactttctagaagagcaccggtgaccctcaagagcggggtcaggacagtggttgagatggaagctgactttctagaagagcaccggtgaccctcaagagcggggtcaggacagtgcttgagatggaagctgacttgctcggcaggaatgcatgtggggatgggggcagtggactcccttgacgcactaacaaaaccgacaggctgtgggggggagtggcatcaggaaaagcagggggacccctgttcacttctgcaagcagagggtgaaaggggacagtctctgaagacctgggtggggcaaaggacagaccccaggactggacagctagggaaagtggtgtggtgagttgagagcaggatattgagagtggcatgtacacaagtggcttagcttttgccgctcctcttctatggcggggagtaagccagtgattaaacctcttgagatctcagcatcccatct

SEQ ID NO: 2328 - DNA, 4200 bp, Homo sapiens
  misc_feature (1)..(4200): DMR17:1939501
aatcccggcccaccttctggccactcccctctcccacctcactccagcctccaggctgtggttgcaaaaccaggccttgcctctcgactgtccagagcgtttcctctgtagcttccctctaattgggcattaattaggcattcgttaatggatccttaaaataatttattttccgatgtgtccagcctgtggtcggataatagccccgtgctcattattggagcaccctcattacggacgatcgtcattacctacctttttccagggtcccagctgccccaggcggccaggcaggcgcgccgaggttggggggccggctccaggcctccaggcccccaccctggagggccaggcagccatctcctccctacccagctagcctccagcccctttgcttctagctttccagccaggcctcatgggagagccggggcacccagggcagctgagtctctgctgcagctgtacccagagcttgtgggatgagagaaccaaccctctggccactctcgggccagccctgctcccggcctcgtgccgctgcctgcccaggctcacggcccagcaggcctcaccgccactgtcaccccctcgttcctggcagaaacagcctcgtaaataagtgacagctcccagctgttgggagttatgggctcccagagagtggcagctgcttcccgtcccctgtaatcacccggcttcgactgaacatttccaacacataaaaatcatcgtacataatttgttttttttgcataattgggctcggttgcgaattcagaggaattatgacttcagcggtggcggtggcacagcttcaaggaccctttctgggccaagccgtgctctctgtgctctctgcagtgacttctgtcccgcccagtgcacagcccgcaggctgggccgaggctgctgctgtttccccctcctacctcagtttcccctcctaccacacgtaggagatgatggcagtgtccaccgtctccacttggaggctcagatctggcttccagcccctgctgcctgcctccatctgcccaaggagacccagcctgcagggggaggcaggggtgtgttgggggaggaacctgggctccaaaccccacttgacttttgggaagcctgcccactgcctgaaccctccacacccagggctgggagggggccccaacccacaccagctgcaccttccacagagccgacactccccgtctctctcagctcacactcctcacccctcctcgggctgctaccctccaggaaggtgcttcccgcacctgtaggaagcttcctcccccagggagccgccccgctctgccaccctgagggagccagggtgcccctcctagctcaagggtgttcatggtgttcactgcttctcatcccacatctcaggcttttggggacggggccacagccaggccattctgcaaagacaaagccatttcgtcccttgggctgcagcaagagaggccttgcggcagggggacggggtgatatgtgtccggctcagcgctaatcccactcgacatttgcacagcttactggagtttacaaagtgcttctgctcacactcccctgagcctcaggactacccggtgtgctggggtgtggggagccctccttcacccactgtgtggctatctctgtaaggtccaggatgcagttctctgaaatgacacccggagaagctaatagcgggtcccacggagagacatttccccgtcagacacaaagcaggtgcctccaagggatgtcaggaaacaggggacaccaggcaaggaccccagtttaggtgaaaaagccaaatggcccccacatccaggagtgggcttggtacgtggctcgtgggtgtgccgtgggtgggaggggtcagagagcaggggtggagtgaagacccagggcaggaaccctcctgcccctcctctgagagggctccaggcttggtgcagggcctggctcacattcccggtctcaaggaagaacaagccattgtatcaggggcctggggcgggggccgggcaacaagccacaggcaccagtgtgggcagcccctcccgtcccagtgcctgaggatggtggagggcccctcgggggccaggcggtggggggggatccgagcccgggggagtgctcaccgaccttgggtactgcccagatgcaggggacccaccccagggaagctgtccttccaggcacccctgcccctcctcctggagagtagggatgtctctgctgagtgcttctgcacgctggaagttggtcccatctccaagacctggaccagctgtcccagctggccccgccgcctctggtaccccctgccagagccagtgggtgccccagtcttggacggtccccctgctgggtttctcccagggaggctggcgcagctttgccacggctcctctcatgcccctccatgcagcccttgggagccccgacccgctgattgcctgattaatgtgcagaagtgaggcccgagccttggcggtgcattttaagattgcaaattagcagggatcagactctctccggaggagccctgcacccctcccaccagcctcctcgtcccctcctgggtgggccaggggtggctctgccagagggggctgaggagagcaaggccgggcctcccccaaaactcccccaagctttccctgggggagtccccctgctcctcctctcctccaggggcacgtgctcggctgactgctcgggtatccccaaacctcctggcctcccacatgcctgagctcacccgcatctctgaggcctcattcattccctcctccattcaacacttgctgcctgagccccggggtgtggggggtgccagtggggagggcccagaatgactgggtggggggatacggaggatcctcatggctcactagcagatgggggggctcactaggagatgggggctcccaagagcaggcagtctggccaggtgctggggcctagggtaggcccctggaggtgtgtgtgggaagtgggggtgctcaggaaagacccctgccatccccgtgccacctgccaacattgttccgtcacctcctggagtatgaatctgggaaccagggagaagggtccctgcctcacagggttgccttaggattccagccagcacagaggaggcaaggagagctgtgttgtgttcaggtcctcctttctgcaaatccccaagtccctgcttgctggtcagggagcatgggggcagctcaggcgggtggcctgagcacgggaagccaccctacccggtccgctcagcagccccagatgtgcctacaagttgtcctgtgaggccacacctgccaggatggtgggaagggaaaggcaatggccacagcccgtgcgaaggccctgcagtgggaagggggcgacgtgccccttcctaccctggctctgtctctcaggctctaagtacacagagcctccaaggaggctgtaacctcagctcagctgggctgggggaacccagagccaggatggccagagatgtccccagtgggaccagccctcacagggcccttgccccaggcccaggccggccagccacagctggtcattgtggagggcactctgcagcttcccggcccctggaagcaggacaggaccaaccaaggcggacccagccctaactgtgtaccagagtcctcaggacagcccccatttcacaaaggaggaaacgaggcccaccagggtaaggcaccggccacggcacatggctggcgacagggcagcgagcaggcctcaacccagctgactgcaagtccagggctctgcccccagctccatcctgcacgtggtgggcagggcgtcctccacgaagggctggttggccctcataggccccagagcctcgagctgctcaccccaacttgccagcaccgaagggactgcccctccctgtgcctgagcagggctggccccatggctggtatccccgcagccccctgggcagggccgtggggctctctgggtcttggagaccggtaagatccctctggctctgcagccctccctctctccccctccccgctttcccagtcctggcagattggcagatcctcctctctatgccagtcgatgctaacccaatgctctctgctggtcagataacagcctcaggccaggccggctgcacttggggctgctggcgccttaggctacttggcactgtccctccatgctgca

SEQ ID NO: 2329 - DNA, 2100 bp, Homo sapiens
  misc_feature (1)..(2100): DMR17:2487901
gaggctgaggcaggaggatcactcagcacaggaggtcaaggctacagtgagctgtgatcgcatcactgtattccagcccaggcaacagagcaagacccagtctcaaataaaataaaataaataaaataaaataaaaatcatgcagtacaccttaaatatagacaatttcaactctaaaaaatgaaaaaaacctcaaaagatttgaaaacaggacctcaaaaagatatctgcacacccatatttactgcagcattaaccccaacagccaagaggtgaaagcaacctaaaggtccactgacagattaacagataaagcaaatgtggtatatacacaaaatggaatactattctgcctttaaaaagaaggaaatcccagcccggcgcagtggctcacgcctgtaatcccaacactttgggaggctgaggtgggcagatcacctgaggtcaggagtttgagaccagcctggccaatatggtgaaaccccatctctactagaaatacaaaaattagccaggcttggtggtgggcgcttatgatcccagctactcgggaggctgaggcaggagaatcgcttcaacccgggaggcggataggttgcagtgagcagagatagtgccactgcactccagcctgggcaacagagcaagactccgttccccacccaccaaaaaaacaaattaaaaaaaacaaaaaaaaggaaatcctgtcacgtgctagaacatggataagtctttgaggatatcaagctaagtgaaataagcgagtcaaaaacaacaaatactgcatgattctactttaaggtaaaggtatctaaagtagtctaactcatgaaaaggttctagaaatctgcacaacaacaagcacagggttaacacactgtacacttaaactggattaagatgggacattctacgttgcgtttctcacaacaataaaaaaaattaagtggccttaaattattattcgcgtactgtactgacatccttcccacttttcaactctctgatacagaagacttattgaagaaaatgtccactttttaaacactctcatgggtcaaataagcaattagatagtaatatacaaaaacacagatcctgaaacaatggaaacaaccattactgataaccctaagttaaccaaagaatccaaaatcctactggcaaaataaaaaattgtacctcgatcaatcaagctaaacttttcattcttttttttttatttttttttattttttgtagagaaggggtctcactatattgaccaggctgatcttgaactcctggcctcaagcaatagcttcccaaaatgttgtgattacaagcataaagcagcttgaagccaggccttcaggctgatcttttaaatgccattcctatgctaactaaagagcaactaacagaaaagaaaaatctagtcatccaaacacctctttgccctttccaggcatagttaagaatactgtgatttcggccgggcgcagtggctcacatctgtaatcccagcactttggtaggccgaggcaggcaggtcacctgacgtcaggagtttgagagcagcctggccaacacggtgaaaccccgtctccactaaaagtacaaaaattagccgagcgtggtggcaggcaactgtaatcgccatttaatagagacggtgaaatcccgtctctactaaaaatgcaaaaaaaattagctgggcgtggtggcacgtgcctgtaaccccagctactaaggaggctgaggcaggagaatcgcttgaacctgagaggtggaggttgcagtgagccaagatcacgccactgcactccagcctggatgacagagcgagactcaaaaaaaaaaaaaaaaacgaatactgcgatttcctagcaatgcccagtgacttaccctaaattcagtgaagcttaaaaagaaagaaaaataagtccagtgataaaagaggaactgttaaatttaagttttgtactacagaaaatttaggaacaacctaaaagtaatcagtatggaattggctaaataagctataatataaccatgcaagaaaatcctatacagttattacaaagaataagattaggctgatctacatatacttgtatg

SEQ ID NO: 2330 - DNA, 700 bp, Homo sapiens
  misc_feature (1)..(700): DMR17:3091001
tctctttgtgctactctgtgctggcttgggtgaggggtgattcaggtaatgtgacagagttttttctacaatgttcaatatggtgttttttctacttctgtgtactaccagggtgctataaactttcacttggattctggagctctcacaaaggtattttcatctgtggatggttgataaattagtctgtatgttggtggatgagagatacaactgtcgattccaccatcttgttgacatcactcctttcacccgttttgaaatatcttttacctgatgtcattgcagcaatatttcacttaaaatatttagtattttccaaatatgtctgtttctctttttaatttcaagctttatatattcctgtgctttcatcgtgtctctttaaatacatctatctatattttattttttaatcagtatgttgaacattactttttaattgatgagttaggtccatttatgtttaatgtaaatttatgtacttccccgagtagactgtgacctcacatttgtaacccagtttgaggcctctgtacactgtcattatgaatagaatgagttgatgaatgactgcatgaatgtcaaatgaattgaacaccacctgtcgaggtctatatcacgtgctggatcagctgatacaaatatgtatgattgcaatctctttcaaacctccacagccatgtgactaactttctta

SEQ ID NO: 2331 - DNA, 1900 bp, Homo sapiens
  misc_feature (1)..(1900): DMR17:3295401
gactaaaaacagagtattggaactctacacaaagttacagttataaaagtaaccctagaaaaaaatcttctaaaatataagaggaaggatgcatacaaaacaaagacaaatgtagcccttacagtgaaaggctatttcaaaacaataaaagcaaacagtataacataacagaacaaaattagtaccaaacacacttacaatgataaagccgagtgggccaagctcatctagtaaaagaaaagaatttcaggttggatctaaaaaatacaactctaggctgatgccaaaatatacagccaaaaccaagttaattagaaagggtgaaaggtaaaggaataccagtcagatgtaaacgaaaataaagcagggatcataatcttaatataaaatgtgtttgaattcaaaaaagtcagtaaatgaggaaaagaagagcattttataaggggtgcaagaagatgtaataggtatgaaaacgaatgtcctaagtatatagcattgatacgtaaagcaaaaagcacaggatgttcaaagagaaatagtcagaaacagggtaacagtggattttagtgactttcagtccatataaatttaagttggcagaataaaggcgataaaaacctcaatatttttcaagaggtagaaccaattgacattgtacaccttccttaaagtgcccatgaaacatttactgcccagaaacagcatatataaaaccagaaattcagcaaacttcaaaagaacaaataatacaaacaatgatatatgatcacagcccaatggaaagaaacatgattttaaaaataaaatccaatatttaaagaaatccttaagaaacggttggaccaaacagagaatgaaaactaaaactaaagaatatctgcaggagaagaaaaaggagataatgacagcagcacattttaaaaaatggattaaatcagtgttcagaaaagaattcgtagccttaaatgagtatatccacaacaacgaaagaattaaatgatccaatcaagacattagaaaaggaaccataagaaaagtcataataaaagcaaaacttgagtagaaagaaatacagagctaataaacaagttcaagaaatcttttatgggtaggaaaaggggtacataaacttgttaaattttttattaattcaatcaataaaaagaaaatacaactgtataaaacaacaatttataaaggaaaataatcacaattacattaaaagattaaaaagtacttacaaagtcactttaccccaatctatattttttgaaaaattggacataattggtaaaatatgattaaaaatcatgtgaaaacttgctcgagaaaagttgaaaaaattgaaacaagctaattactatgggaaaaagatacagagaaagttgttcaaaaagggactccattccattacactaccaccaacattccgccatccccaccaaaaaatggaaaaattgtgttaaactttcaaggaatcattttttccaatgttacttgactgtactgggatattgaagaaggaaagcttttcaaattacgtttatggaaggggcataacatctggttcttttctttcactctctgctccctcagccagtagctgccccctctgggccctgcagagattcccttttctacacaggttcattttatatctgcaattaaggcagagcagcagttatggacaccaggcagagctggtggaagcctcaaagctagaatcccaaattaggtccccataaggtggtggctgtcggatttgggagatgttgcatagggtgtctcctaaaaattcttaaatcaacaattcctgttgtatcaccctctgagtctaatcatcgacttaaaaatcattcactataaatactctgtgaattgacatatctataggagcaga

SEQ ID NO: 2332 - DNA, 1000 bp, Homo sapiens
  misc_feature (1)..(1000): DMR17:3686001
gagaacgcacagcggggcccccagggaccctcccaacgtcccccgccccccgcccagcctcagaacaggagaacgcacagcggggcccccagggaccctcccaacgtcccccgccccccgcccagcctcagaacaggagaacgcacagcggggcccccagggaccctcccaacgtccccctcccagcctgagaacaggagaacgcacagcggggcccccagggaccctcccaacgtcccccgccccccgcccagcctcagaacaggagaacacacagcggggcccccagggaccctcccaacgtccccctcccagcctgagaacaggagaacgcacagcggggcccccagggaccctcccaacgtcccccgccccccgcccagcctcagaacaggagaacgcacagcggggcccccagggaccctcccaacgtcccccgccccccgcccagcctcagaacaggagaacgcacagcggggcccccagggaccctcccaacgtcccccgccccccgcccagcctcagaacaggagaacgcacagcggggcccccagggaccctcccaacgtcccccgccccccgcccagcctcagaacaggagaacacacagcggggcccccagggaccctcccaacgtcccccgccccccgcccagcctcagaacaggagaacgcacagctgggcccccagggaccctcccaacgtccccctcccagcctgagaacaggagaacacacagctgggcccccagggaccctcccaacgtcccccgccccccgcccagcctcagaacaggagaacgcacagcggggcccccagggaccctcccaacgtcccccgccccccgcccagcctcagaacaggagaacgcacagcggggcccccagggaccctcccaacgtcccccgccccccgcccagcctcagaacaggagaacacacagcggggcccccagggaccctcccaacgtcccccgccccccgcccagcctcagaacagg

SEQ ID NO: 2333 - DNA, 900 bp, Homo sapiens
  misc_feature (1)..(900): DMR17:3917201
acaggggatgggtctcagcaacacgggacagagaactggaggccaccattgagtctggggcacagcacctctgcagtccctgccttcccttcccacccccagctcgggccctgaacacaggggtttggggtgggcagagggtcccacgttggctcctcagagctggaggcctccccagccccacccctcgttttgaagatgagaaaaccaagctcagagaagagaaatgagttgcccaagctcacccggggtggtactggaggttcaagctggaagcaggggcctccctggcgagcccccacggccctgtcgtcggagccgccccacccttaaggctgataaggagtcttcttgctggcgagccatgagctggaagtgctctgggcagggagccaggccctggggctgggaatcccggcagcctgtctgaatgggggtcacccacagagggctgcccatggccccttccagcacccaggtcagtctctccttgtcaagtagatcagcctcacccctcgcggagtttctgctaatccagtgggtgtcatgggcttttctaaagaaaatccagagatgctgggagccagaactgtggtggccacgtctccccttggcctgaccttgaccctagacagttcctttcccagctgcccctgtggccattggaatgggaggcaccaggacacagctgcttgtgatggggagtggggtgggtgctgagactgtgtgggccattctgggtcccttttcagccacccttctccctgatatgcgttctagagagtgggtggggtgggagggaacggagggaggaagggagggagggagggaaaaggaagggaagggaagggagggagagagggaggaggaaagggaagggaagggaggaaggagggagga

SEQ ID NO: 2334 - DNA, 800 bp, Homo sapiens
  misc_feature (1)..(800): DMR17:4586001
ccccttctcagtgggtatctcagcaaggctttgtgctgggggcctggggcttgctgctactggtgcagatgagggtggggtgggggctgtgcaggaagcctcagaaaggctgaaagtactcactggtgagtgcagcctcgaggtatgcgagtggagtgggcagtggcgaatgcccctagtgtgctgggcagaggagttgggctttgcccggcctgtaagaagttcttaaacatgtcatggtagcagaacccgggagtgtcccagtgctccgtgtgaaatgtctggaaatgtggatacacttaagtctgtcttatgaacatgacactctacgtgaccatggtctaaaatcaccactgtgagctcacacgtgcctcatcaactgtgtcatcggttgtttctgaggttttatttgaacatgcatttgctatttgtctgctcatagcagcagctgtccaaattaaaaaaaaaaatgtcaggttcacatatacatgtagatgtgtgtgtacacacaaagagagagagagagagagagagagagagggaattctctccagtcgtgatttttgtcaatggagattagccattgttcactggcaccaagctagtccactaggttaggagttggtggatgaagctcaggatgagggtcttctttgtgtctggcaagccctcttcggggtggatggaaggtggagggtggctggaggtgggtaacttgattgtgatggtccaaggagaaaggaaaggtctgagctgggccgtgggccttggtgtgtagaggggctgccttggacagggtt

SEQ ID NO: 2335 - DNA, 1300 bp, Homo sapiens
  misc_feature (1)..(1300): DMR17:5180001
tttatccttataaacattagctctcactgtacagcattgtaaagacaagcagaagagttagacttttttttttttttgagatggagtttcgcacttgttgcccaggctggagtgcagtggcatgatcttggctcaccgcaacctccacctcccaggttcaagtgattctcctgccctagcctcgcaagtacctgggactacaggcgtgccccaccatgcctggctaatttttgttatttttagtagagacggggttttagtatgttggctgggcatagtaactcctcatgatcaactcgtgacctcgtgatctgcccaccttggcttcccaaagtgctggattacaggtacgagccaccgcacctggcctacactcattactttcacagggttttttcccacatttaaacttgtcactcgactaggaagtcaagattgaaatggctctttccatgaataatttagttttggggttgttgccaaagtgatttataatgattttaataatgatagacatcccttaaaacattctcaagtaattagacccctggggctggtgcagtggctcatgccggtaatcccaaccctttgggaggctgaggagggaggagtgcttgagcccaagagttcaagtccagcctgggcaacatagtgagacctcatctctttgtatgttaaaaaataaataatttaaaaaattgtatcgttgggaccatattctagtgtcagttctgagacagaaaaaaaaaaggtgattatgtccaagagcttttggcttttccacttgattatacttacgtttgaaaaatccagtaggtattttctctgctttcccaccttcccatggtttttttctaataaaactcatttgtagtgcaataagatgtggtctccatcagacttttcctagttttactgcattcattaggtttctgctacctattagaataggtcctgtttgtagactcttacagtcttcaaattcctttccaatgtgaagtttctggtgcttaagaaaagctgtccacccactgaaggccttaccacagttgctacattcaaagggtttctctctggtatgaattctttgatgactgacaaggtgtgagttctgactgaaggccttccaacattcagggcattcatagggtttctctccagtatgaacacgatggtgtctaataagatctgagctgcccctaaaagatttcccacatttgttgcatacataaggtttttctccactgtgaattctatgatgtctcagaaggtctgagctctgattgaaagttttcccaca

SEQ ID NO: 2336 - DNA, 200 bp, Homo sapiens
  misc_feature (1)..(200): DMR17:5298001
tcccttcctgagacatacagttaatctccttcatccacatgtaggcagatagctatttattaaaaattctgttccctctctgtgtatgaccttgctatttcggaaaagcccataaataatgcagccaactttccttgtaaataaaatataaccctgtgtttttattatttatttagaagaacttttcttctgataagtaa

SEQ ID NO: 2337 - DNA, 200 bp, Homo sapiens
  misc_feature (1)..(200): DMR17:5739301
agtttgaggctccagtgagctgtaaaaagaagaagaaattaaaaaaaaaaaaaaaaaacaagtctaagtagaagtgttaaaaagctaagactaaacattgggcgaatgaatacaatatgtaaatttcaaacttagaagaaaaatgaaagcaagtttgagcaaatcaaacaaagccagaaagggaaaaacaagaacagtga

SEQ ID NO: 2338 - DNA, 2000 bp, Homo sapiens
  misc_feature (1)..(2000): DMR17:7716501
cctgctgtcagcaacaggagtctggctgggcaggaggaattattgggggtcggggggagggaaagggttgacacttctgggaataaagatacggtaggtgggagggtgaggtcagcgctgggatagggtgtggttaatccacttgctcttcaggagtaccagggactgccactcctggtagtgccaggctggcataatgagatctgttaggtgtgaacgccaaacagaaaatgggggaactgaggtgccagcttctcttctcctcatccagcaaagaaaatgtcataaatttcgctcctcatggaaatgtaatcagtgggctcgctgctggctttgtcttaattaggcactattgatggaaacagggagggcgccttcccatccccccactcggcttcctccctgtatttcccaggtctccccaaagctcctcccggcaccaggtacagcggtcttccaggcgccttctagcagccccggcccgcagcgccccctggcaccctcggagatgtaccccggccctcatagccctcccctctcgcctcctctctcacgacgcagcctttgttcctatggagagcgaagcccctcccaggcccggtcaccttccccagggagtccccgcctctcatcccccccaaaaaccagcgatgccttcgaaagccaatcctcagattcccaaaactccagttcccgtcttccctccctttccccgccccgcgccgcccccccgcaatcctagaccccaatccgaactaagaagggggaaggagcaggagggcaagggtgctccaggcccggtttttcccccggatccagctgcacccacggctgcctggaaatcctggaacgccttctacatcgcgaatatccctcgccggcctggcgcccggcgccatctgctggacccgttccggctggggcgcacagacctgggcgcggggtcgggcgattgggttctccctgccttttcaatgtcctgcggggcggtggctcactgtctctcgccccagcccttccagctgggtcctgacaccaggccccccgcacccttcggctcgccagatgtggctactttcctttagtcccggagccttcaagccctgggtccctgaggggtagacctgggcggggtggggccgcgaagcagggatccagggcgcctgcgcggaggaggcgggctccgaggggccgcacaccggccactcgcccctccctgcccggggttgccatggggacgcgtgcagacgccggcccgagagggctgcgaggggcaacttcttagagtggcccatcggtcggtctagggaggggagggtcagcgtggcaaggtgtgtgtcgggggcagagggaaggagggaaggagtgctggggagaaggggcagtagtgtcggggtaggaagggacagttgttggggagaagaggcagttgtggagggagagggagcaaggaatatttgtgtgggggagggggaggagaaggggcagttgtgacagctgggggggaagagccattctgaggggaaatttgcctgctggtaaccagtttaaggataccagctgctggtataaatactgctggataaatactgctggatttatactgcaggataaatactgctggcccctgcggtatttcctagtactagagtgagccccgacttagcagagcagttcctcctggggcctgcggtgtgggatcgcgtggtgaaccccacggtgcatgcgcctcaggctctagtttgaggcaggaaagcgcagcttgatgcttctctggagactgatggaggaagcctccttgctgtagttggttttattgatttgctggcctaacagaacgtttttccttggagcaaagtacaaatccttcaagtttgaaattcataacctgagatcaatgcctgtggcagcctgtggggatgaggaaggagagccacaggtgccgttaggctgcagcctaatgaaaagagagtgcccagcgcctcagactttgcgcctgg

SEQ ID NO: 2339 - DNA, 200 bp, Homo sapiens
  misc_feature (1)..(200): DMR17:8484101
tatatttgttgaacaaatggataagtaacaaaccaacctcctgcaattgaaggatttctgcttccagactcttcaatttcttttcactctctttggattgagcaaaaatctcatctctggatgcacgagcttcttctaattcacgttggtaatccttcatctgagcctaagattaaataagaaggttttggggtggttta

SEQ ID NO: 2340 - DNA, 600 bp, Homo sapiens
  misc_feature (1)..(600): DMR17:8720401
tagcaaattagtttctacattcctgattgtgcatatgtgtgtctgttctgtggattcttctttgaatgcagttttatgtcatactggttatctcaactgatgagttagataaaatcttttttttcctttttttttttcttttgagacagagtctttctttgtcatctaggctagagtgcagtggcgtgatctcggctcactgcaacctctgcctcctaggttcaagcgattctcctgcctcagcctccgcagtagccgggaattacaggcgtgtgtccccacgcccagctaatttttttatatttttagtagagatgggatttcaccacattgaccagcctggtcttgaactcctgacttcaggtgattggcctgccttggcctcccaaaatgttgggattacaggcatgagccaccacgcccggcgagttagataaaatctttgtgacatctccatttatgtttatatgtatatggcagtcataactttaagaaaattatcctttaacaagatggtcttcctgcattgattctggcctcctcctattcttgccccctatccagtccattctccgtgaaggagctagagccatctttgcc

SEQ ID NO: 2341 - DNA, 2500 bp, Homo sapiens
  misc_feature (1)..(2500): DMR17:8836901
agctcttctgtgattcctgtggcctgggtgagagggaggagggggaggtgagagggaggaggtggaggtaagagggaggagggggaggtgaagggtcccgggggagtttccggggaggggcttgggagaagaggtggaaggtcaggcctaacagccagacctgggctcacagctctctcccaaacccacaccttccagcctcttctcccagcacctgtaagacatccatttgtcgccccgccccaacttaccaagataaaaattcattgcatcaagttatgcaagcaaatcaacttcctcccagccctcctgctccatcagggaagcacattcctgcggttctccaggctcaaaaccatggaggcacttcctcagtctcctttgctcctccttgcatcccacaggcctgaaatgctccacagtgcccgggaggcccccctctccctcccgacctcagtgtgccctccgtctctgccggagctaagccccatcttgaccctggactctccagcaaccccagacttggtcttcctgcctgccttaaccaccactcccacccgctgcaacaacacgcagctcccgattactcctcctgagacattaaccacatgagtatcatgtctcttctctgtgtagggatcagtgatgtctcctgttgcactgcacacaggagcaaacccaaagacctcatcctgcctttcaaggccattgtctctccagagttctctctccatatgggagggaaagggggtggctagtgctcagaagccagtttagggcaggcaatccaagggattttctaggctcatcctggcggagactgagtgcccactaaggggagagtgtccagcccagccacatgcaggtcaccactaccacctcgacctcagtccccagctcaccttggtgagcacgtacattacagtgtgcagcaagggaatgatgacatgccggaggtcctggctttccgcctggaaaacaggagatcacgtgacaggtattgggctgggggaatccccacttcatagcgggaggcagtctaggctgggagtgggcaggagatggggtggaaggcagccagggggagagcaaagggccattgtctgctctggatagaggagtggggaggggagggcacacaggtgaggaagcccctcagtgagggtgtgggagcgtgggggggcctcagagaactctgcaggtgaggggccaaatttaattagggtaggagtcgcagcaaagcaacaaacaagtcctcagctcggagcctcccttgagtgcagtgtttcccaaacggttgcaaagtacaacattgggtagtgtgaaggagaatttaggtggcccgaggataattttgagaaacgtcaatagtcgtatatttatgtttataggtaccttctgtttctgacaagtgatgcgggttttccatttgtggtcgcgttatagtgcttctttttgaaagatgtttattcaagtaaaacaatgagagtcgacgtaaagaaaatactgcttacgtaaaagtacaggagggagatgcatatggtaaaaatcatgcaggcaaccaaagcttatgagatatagcgctgccaggactgagcccctgcccaattggcccctctcttcctttcatccccgtcttcctccctgaggtccaggaactcaccttctccagttctctgagaagaatgcggaccagcactgggctcttaccgggatctcgctcgaccttcttgtgcagggaccacctccacatgcctgggccaggagaaaggggagcccggcatgagcaggtgggcagttcttagaggagacccctctgagcaggaccctgagccctggagcctcagctgcagctctgaccagccacgggtgtgaccccgccaccagcgcttggctccaggtgcacctgggtgggctcctcccaagtggggagttctagtctgtagccctttgtggacagtgaattcccagggcagaaaggagggcaggtgggacacaccagtggggacaggtgtgtgacaggtgtatgcgtgtggaccacagagcagcagtgcttgcaggtgtgtgctccgagccacattctggaagtcctgcaggcctggagtgctgaggggaattaggtttggaagtggagctagggaaggtggttaacaaagagggtggcaggccgggtgccgtggctcatgcctgcaatcccagcactttgggaggctgagacaggcgggtcacttgcggtcaggagttcgagaccaacctggccaacatggtgaaactgcatctctacgaaaaatacaaaaattagcagggcatggtggcacacgcctgtaatctcagctacttgggaggctgaggcaggaggatcgcttgaaccagggaggcagaggttgtggtgagccgagtttgcaccactgcactgcagcctgggtgacagagtaggactccatctcaaaaacaaaagaaaaaaaaaaggaaagaaaaagggtggcagatccccaatgtg

SEQ ID NO: 2342 - DNA, 600 bp, Homo sapiens
  misc_feature (1)..(600): DMR17:8850701
aaaacaagcgaacaaacaaacaaacgtataactgggaaagctaatctaaaaagagataacgaagagacaatattagaaatgataaatgtcatatatatatttctttataccaaaaaagaaaatctgagtcccctgtgtcgcacatggttttctaggacaataaaaatgactcaaaaggctctagaagagttagaaaaactgcttatatttgtaaccagtgaggaaatagagacagttgtcaaagaactagctctaagagagtggtgtctggctcagatagttcttctgataagttttttcaaacctacaaagaaaatatctacgttatttaatctgctccaaagcatggagaaagaagagaagattctcagtttattggacaaggccagcttcaccttgataccaaaatctaataaaggtagttaaaaaaaaaatggatcacgcacttcacacccattggaatgaccattttagatatacagaaaaaaaaaacaaaaacaaaaaaacaaaaaaccggccgggcacgatggttcactcctgtaatcccagcattttgggaggccgaggcgggcagatcacgaggtcaggagatggagatca

SEQ ID NO: 2343 - DNA, 300 bp, Homo sapiens
  misc_feature (1)..(300): DMR17:10611401
ttatgtcaccattgcccccttgaatgtacccaacagtgattttcttgacagcacctttactgcttagccactgtacgcagatttggccaccttccctgtgcaccttgccagggctgcattttcccccatgaaaatggaagcttccatcggtgcgtgtcggccgcaatcctccaagtaccatctctgtcttccaccgcccgcatagtataacttgagggcttccacataaacctaggataggagaaacagagatgtattttgttacctaggagctggtatttgtctggaggaaagtgtgga

SEQ ID NO: 2344 - DNA, 600 bp, Homo sapiens
  misc_feature (1)..(600): DMR17:12794501
cagtgatggtccaagtggggcttgtcctcttgtttaaaatgagtgatgttcaaagtgtctgggagtaggtgaggaactgtgggtgtgcgggaaggagaaggctggttgggtcgggttgaattgtgtggatttagaggctatgagttggggagtgaagacaaagttttgtctctggagccttgttttctattccttgactgctttgcatacattgcaaagcaggcttggtttctggtgcacagctttgcaggtatcattgctgctgtgcagctcttggaattcagctgcagaggcctaggcattagccagtggtggggagcctgggaactggaggctgaggctgcagcagcctctaggagcactggtgctgcagacatttttgtctgggccaaagctgccaaagtcagtgaggatcttttccttgaaggtatctctgagacattgccctgccttgtagtaggccttctaagagccgtgacccaatcaataggacattagaggaaaatcagaaccaattccaaatttggctttggactgctttgttccttcccttctatttcccttactgtgagttagacctgccagaccaacacaggccct

SEQ ID NO: 2345 - DNA, 400 bp, Homo sapiens
  misc_feature (1)..(400): DMR17:13852801
attggatgctcatgatgtatcaggcacacttgtagaagtaatggatgcagcagtcaacaaaatagaaaaaagttcctgctctcatggagctgacattctagtgggaggacaaagataataataaattcacttaaatatgtcaggtgaaggataagaaagcaaagacaaagagtgtcagggtagggtgccattttagaaatgaggttcaggaaggcctttctgatcaggtgacatttgagcagaaacttgaaggaagtgagggcacagtctaataaattaaataagcaactggaagtagtacactaaattgccaggatagagaataagcaggatgctagaggggcacatggcaggatcgcctaatgtggtcacagacgtggggtgaggagggcttctggga

SEQ ID NO: 2346 - DNA, 200 bp, Homo sapiens
  misc_feature (1)..(200): DMR17:14774501
ggattttccccttgccgttctcatgatagtgagtgaattctcacaagatctggttgtttgaaagtgtgtagcatctctcattttactctctctctctcttctgctggccatgtgaagatgtgcttgcttcccctttgccttcagccatgactgtaagtttcctgaggcttcccaaaccatgcttcctatacaacctgtgg

SEQ ID NO: 2347 - DNA, 3000 bp, Homo sapiens
  misc_feature (1)..(3000): DMR17:15302201
cttggagctcttggacttcagcattagaatatttaccctcctggagtagctgcaacattttagatgagaaaccaaatgtttatttgtggaatttagccttgcccacggtttaccaaaataacaaaaaaaacttttctatgtctgaattacatttccttcccatcacagtcttgtaatgccaggaatatatatgcttcagtaaaaggactgcataagcatatattcctaaaaaaaaaaaaatacagttcatgaaaaaagtcagaaatgttttaccccaaacacataacaaataagagacatgctgaatttatgtttattcccactattgtctaaaagtcataactaccaacatttggttactctcattgctaaaaattttagtggcatttatatacctttgtttccattagaggcaaaaacagaacaactaaacctacaatttgatttctaaaatgatatactgagaccacagcacaaccccaatacaagcttctcatctggacatccactcttctggcattctgagatgatttgtgaaatttactaaccaaggtcttaaaacacttttaagaaacagagagagagaaggaaatggagttggggttaatggacagtggttaaggcagagcaaggagaacacaaggatacagagagaaatgctaataagagagagagacacagaagcgtgagaaataggagagaaaagaaagaaaatcttgctcccctcctggttcatcttcccatttcagagctctcagaccaaaaggattcaaaactagcatgctttctacaccatctaaacatactttccaggtgattaaatgccacttttaaacatacaaaagaattagaataaattataaataaattatcttgggatacagaagtgctttctgagcataattccaaaggcataaatcacacagaaaacactgacacatttttacttgtgtattttaaaaaaccataaacaaaatgtgaaggtaagtaacatataaagaatatattgtcagtacataggacaaaagtgtcacatatgaagaaatacagtgggcgaggtgcctggagaaggggggcagtgggtgttcaactccaggttcaggggctgggggaactgaggagtatctctgagcatggaaatggctttatgaaagcaatgctcaagtaataaaagtttgaattggagagatgagagtggaacaaaaagagacgtgcagaacacattatgaattatgcattatgaatcacagccaagctggccctacctactattgttccaaatgcactccgtatttctctacctttgtttttgatcaaattaccccaactacctcatacccagtggcctttccccttcttactgtggatcctttaaagcaaaactcagaaaccacctacttcatgattcctgactgcctcagagagaatacagtcctcctttccagcccattcggattacacacaaaatgacaagaatcacaccagttatcctttttaccttctctattagattgattatatttcttcatatccttcccataacccagacgcctagtaaataatagaaaattaaggtttggatgcaaacaaaaggctttccgagacaggaggttggtacatttccatcagcataatcctttaataagtgactatattagcattcggttcaaatgctgagacagtgctctggctcagccttaacttaggggtatcaaaaccacacccggtggggtccctagcagaagccgaccagccggagggtgttggggtagctcttgcgcatgctcatgcatttttcctggtcgatgtacagggaattggctttgacagccaggtcatactcgagtgtggctttgatgtggaccagcgactgcagggtgtcctctgcatccctcaggcgctgctgcagggtctggatggtgtcgtcaacctcgtgtacctcgttaacaaggctgcagcataaaggaatcagcatggttaggtcagcatgtagcttacgcaactccaagtacatcacattgtaaccagcgatgcaaagctcacattttctttactttaggatatatttatcagcaaatgagaggtgcatgaaattaataaaatataaagaaatataaagagaatggtgacaatgaaccaatgggaatgtagatgtcccaggagatagaaaaggatttcataattatagaaaaatatctagaccattttaaaatcattatgccaaggcaattctatagtttcacagaaattcacaactggaaaacgaatttagagaggtcaccaagcccaacttccttgttttacagactaggaaatagagcccaggggttcataagctgtcctttccatcgacacagggcccacatgtgtttgtaagctgtacctgcttatccaggaagctaagaaggaaattcagcgcttcagtggccataataagaaactgggtcccatttcctggccccattcccctctcagctccttgagacagaagagtagaagcagagacccaggaagacctatctcatcatctgcagacacatcctggaatatgcttgcaatttctcagacctcgagggcttcactcttgctgtcccctaagctcagaatgctcctaacccattcttcatcccgctaatttatcccatcctcaaatcctaggtgaattaacacttcttccggaagtccctcccttaaaccggaaaccatctgctgcccagtgttgtgacttccaaaaggaccaagccttttacggcactcagggtcttgtgattgtctgcttgcaacatctgctgtccttgcccagggctacatccacagccgctcctgcaaaaatacaggtgtgcaaaaactacttattgggtgaagaccaactttcatgccctaggtgaaacggaggacgtcttgggaggtagagagttgcccaaggtctgaatccatgggatctactaagaacaagacccagacccaaggcaataaaaaggaaggaaaggcaggacggag

SEQ ID NO: 2348 - DNA, 2200 bp, Homo sapiens
  misc_feature (1)..(2200): DMR17:15486701
aactagtaggaatttctttttcctgattcacaatttcacagtttcacagatagaacattcgttctttttctttcttttctcttttcttttctttttttttttttttgagatggagtctcgctctgtcacccaggctggagtgcaatggtgcagtctcggctcactgcaacctccacctcccgggttcaagtgattctcctacttcagcctcctgagtagctggcattaccggtgcgtgccaccatgcctagctagtttttgtatttttagtagagacagggtttcaccatgttggccaggatggtctcaatctcttgaactcgtgatctgccacctcggcctcccaaagtgctgggattacaggcttgaagaaggttcattcttactgtagaacttaacaacgtcagcagatgtttttttttccgtcattgagaactttcaccttttcacttgaaggaagcactttatgacttctctttggcatatctgaattgccagcactgccactcttgcacccaggggccattactaagtaaaataagggttccttgaacacatgcactgcaatgctgccacagtggatttgataactgagtcagctactaagtggctaagaggtgcaatttaaaatatgaattatttctggaattttccattttatgtttttggaccacagttgatggctggtaactcaagctggtaacttttggaaagcaaaattgtcaataaggggagggaccactgtagagctattttaaaactctgccctggctccccctactatgcagacagaagcatcatcattcaaagcctcacattctaccgacgctctctccccaatctctgatcttcacttctcctactgtccccctcctggctcctcctgccccagccactgtagcctccttgttgtgcctcaaacatgcacactacagacgcaaatctttgcacctgctcctccttctccctccatttatctatgtcattactatgacatatgtcactactttacctctctcaagtcatcatccaaacatcaccctgtcacttgccaaagcggccctcctggcagcccacatctgcccatggtggtggtatacgctccccaatcactttcttgcttcatgtttcttcattatccttctgattatttaggccactagatacttattcattttgtctattacctgcaacaccaactagaaggtaacttgcacaagggtgggaattttcactggatgtattcattgtcgaatccacaggacctagaacagaggccagcacccagaaggcactcaatagacatctatcttcagtggttatgtggttatttctgtgcactgtcttatgggcaaccagatttcttttctgaggttgtttgttgtttggggagattttggggccttgcaagttttgtacaatgaatatacattacttagatagtcaggaaaaaatgttatataagggggaaaagtcctaccactgctgccactgcctgtgggatgcaatcctgaactccttagcaggcgctggcttttccaaagtcaaagctcttcctcccctccctttccactgccctaggtcaaaatgaatccagtggagtcctggttccccgagatgaaagtagatgttctctgaaacaaaaagagagaattccctgtgcttaaaaatggttaaacaggttttgtcgtgtttggtttggtttgctaagagcctgcagtaagctttgcacatcgtggaactctaagaaggccacatagtgggatacccaccctgacatatttgaccccagaacctcctcttttactggctcatctccaaggactcgagttccaaggaacaagtcccagggacgtcgcccccatcagacaggacacttggctgtgcagcagcccaagctcctggaatcctctcccctcctccacctgtagaaactctacccatgcttcacaagacagtcctgcttgtgccctatctaggaatccttctctactctcagcccctcattcccctgtgtttctacagaacatcacatctatgatgaaagctcttatcatggtcattgctccagctgtcatcaacagctgtcatcaactggtgtcttcaacaccagactgcaagcccctcgggtgcagcaatggggcctcctccacatgggtttcccaagggcatggtgtgatgctgggctctgggaatgttt

SEQ ID NO: 2349 - DNA, 1900 bp, Homo sapiens
  misc_feature (1)..(1900): DMR17:15819901
caccaccatgcctggctaatttttgtatttttagtagagacggggtttcaccatgttggccaggctggtcttgaattcctgacctcaggtgatccccccgcctctgcctcccaaagtgctgggattacaagtgtgagccaccatgcccggctggaagttgccttcttttttttattatttttaatttttttgagacagagtttcgctcttgttatccaggctggagtgcaatggcacgaccttggctcaccgcaacctccgcctcccgggttcaagcgattctcctgcctcagccccccgagtagctgggattacaggcatgtgccaccacgctcggctaattttgtatttttagtagagatggggtttctccatgttggtcaggctggtctcgaactcccgacctcaggtgacctgccttcctcggcctcccaaagtgctgggattacaggtgtgagccatcgcgcctggccagtcctctttttatattttactcaagttttttttgtgtttgcggttcagttttaaagtttattaaatgctttaaaaaacttttcagctaaatgatcttactattttctcctgtatttttctgctaatgggatgacttacacgattcattttgaatgttaaggaccttgcattttggtgtatattccgtttagtattgatctactgtattttcataggtgacttcattcatataatattttgcttagaatatttgtagctctgttttatttatttatttttgagacagagtctcgctctgtcgcccaggctggagtgcagtggtgcgatctgggcccactgcaagctccacctcctgggttcacgccattctcctgcctcagcctcccaagtagctgggactacaggcgcccgccaccatgcctggctaagtttttttttttgtatttttagtagagacaggttttcacgtgttaaccaggatggtctcgatctcctgacctcgtgatccgcccacctcggcctcccaaagtgctggaattacaggcatgagccaccacgcccggccccagctctctttattaaaaaggagatacatactgtttatgaaagaggtgacataattttgtttatttgtgtcccataatgtgtcctggtccaattgtgtcctcaatgtaatgccagctacacaaaaaattttttaaatattatctttattttcattttagtgtttttctttgtatggactattctataattatgagctgggaatttttcattgttcagttgtttttctgatttttggtagactggacattttcctgtgtttcctgaccatttgcatctcctctcctgctctgtgcactatcaccctgctccagctgcttcccggagcctccctccttcctctccacctgcccgcgtcctccttgtccttcagtttcttcctaagggcccatgggctttctttggcttttacgttcctctcactccacctttgacagttgctgggcttcccatcccctgggaggtttcagaggatggggaagacagaggagtgcagttgccatgcagtgcaatatgggccataatgttcatcctccacggcctgtattgaggacttgctgtgtgccaagaatctgctctaagaatgtaactgtgctccctcacttcatgctcataaccacctgtgagatgggcaatgttctcatccacttttacacagagaacacagaggcacagaggagtttcataaattgctaccaaggccttccgctggtgtgcagcagggtcaaacccaggctgtctggccctggggttcagcctctcaagtgctctgctagatgttggacaggacaaacgagacacagagaatgaacaccacctgacttgggctggggaagtcagggatggcttcctggaggaggtg

SEQ ID NO: 2350 - DNA, 3400 bp, Homo sapiens
  misc_feature (1)..(3400): DMR17:16226901
acctctcaggatttatgtctacctattgttttagtccttcaagtatatcccttactttcctgctagttaaaccatgcattctagaacatgtttgccttttatctcacatgttcaggtattcatcctgagggtttctctgcatatctgatttaccatattgcctaaatagaacttattaggggttatttttaatactgcttttttgggttttttcttttttttttttgagacggagtctccctctgtcacccaggctggagtgcagtggcacgatctcggctcactgcaacctccacctctcgggttcaagtgactctcctgcctcagcttcccaagtagctgggattacaggcgcgtgccaccatcatgaccagctaattttggtatttttgtagagccagggtttcaccatgttggccaggctagtctcaaactcctgacctcaagtaatccgcctgccttggcctcccaaagtgctgggattacaggcgtgagccacctcacccagtgaaaggtagcaatttcattagtaagagtcgatatgaatgcaatccttttgggaataatgagaaatgacactactcgcaagtatggctatattggctgataatatagcatgtgacaatgtttcttgatctgcagagatatgagctcatttttctttttaattttcttttctttttttttttttttttttgagatggagtttcactcttgttgcccaggctggagtacaatggcatgatctcggctcactgcaacctctgcctcccaggttcaagcgattttcctgcctcagcctcccaagtagctgtgattacaggcatgtgccaccatgcccggctaattttgtatttttagtaaagactgggtttctccatgttggtcaggctggtctcgaactcccgacctcaggtgatccacccaccttggccccccaaagtttgggattacaggcatgagccactgcacccagcctttttaatttttttctcttagtgatcttttaaagacaacttctgttttatagggataacgcctataatcccagcaatttcataattgaaagattttattcattgaaaatccagtttttaatattatttaaattgtggtaagacatacataacaagaacttaccattttaaacttttttttttttttttttgagatggagtttcactcttgttgcccacactagagtgcaatggcatgatctcggctcactgcaacctccgcctcccaggttcaagcaattctcctacctcagccccctgaatagctgggattacaggcacccaccaccaccatgcccggctaatttttttatatttttattagagaatggagtttcaccatgttggccaggcttgtcttgaactcctgacctgaggtgatccaccttcctcggcctcccaaagtgctaggattacaggcgtgagccactgcgcccagcgattttattttattttatttctttatttattttattttatttttttgagacggagtcttgctctgtcgcccaggctggagtgcagtggcgcgatgtacgctcactgcaagctccgcctcccgggtttacttacaccattctcctgcctcagcctcccgagtagctgggactacaggctcccgccaccacgcccggctaattttttgtatttttagtagagacggggtttcaccgtgttagccaggatggtctcgatctcctgacctcgtgatccgcccgccttggcctcccaaagtgatgggattacaggcgtaagccaccacgcccggcgattttaaacatttttaagtgttcaattccatggcagtaagcactttcatagtattatgtaaccatcaccactatttcatcatcccaaatagaaactctatacctgtttagcattccttttcccctcctctcccaagcctctggtaaccaccattctttctatctctatgaatttgtctattctaggtaactcgaataagtggaatcatacaataattgttattttatgcctggcttatgctaattagcatactgttttcaaagttcatccatattgtggcatgtatcagaacttcatttctggttgagctcagtggctcacacctgtaatcccagcactttgggaggctgaagtggaaggatcccttgagaccaggagttcaagaccagtctggacaacatagtgagatttcgtctttacaaaaaataaaaataaaaaaattagccagtctgggtggcgagtgcctatagtcccagctacttgggaggctgaagtgggagaatcccttgaatccaggaggtcaaggctgcagtaagctctgatcagtctgctgcattccggcctgggtgacagagcaagtccctgtctcaaaaaaaaacttcatttctttttatggctttattaatattccattgtgtatatatacatacatatatatatgtatgtatatataccacattttgtttatcattcatctaatgataggcacttgggttatttccaatttggggctattatgaataatgcttctatgaacattggtgtacaagtatttatttgagtaccggttttccttttttttttttttttttttgagtataattgctgagacatatggtaattctgtatttaaattttttgagaattgacaaactgttttctgcagcaactgtacagttttacgttgccaccagcaatgaactatggttccagtttctccacatctttgtcagcatttgtaattttccattttttggactatagccatcctagtaagtgtgcagtgatgatgtcacattgtggttttgattttcatttccctgatgactaaggatgatgagcatcttgcatcttttcacatgcttattggccatctatatatcttctttagagaatacctattcaagtcctttgcccattttctgattctagtttcattttaaagtcatgattttttttttttttttttttttgagacggagtctcgctctgtcaccaggctggagtgcagtggcacgatctcagctcactgcaacctccacctcctaggttcaagagattctcctgccttaacctcccgagtagctgggactacaggcgtgtgcccaccatgcccagctaattattgtatttttagtagagatggggtttcactatgttggccaggatggtctcaatctcttgacctcgtgatccacctgcctcggcctctcaaagtgctgggattacaggcatgaggcactgtgcctggccaagtcatgatttcttagactgggttctgtggacacatcctaatagaagaggatctagctctcttagtttcagcttcctttgggaacccaggcctctgggctccagtaacactgcctccttcctttaccttgccaaccgag

SEQ ID NO: 2351 - DNA, 1200 bp, Homo sapiens
  misc_feature (1)..(1200): DMR17:17147001
tagttactgaggaccgcacggcctggccaccagccacaccattggtcatagagcccacagccaaggcctgctcagctgtctgtgctgcctcttcactggagggtcacagcttagtgagcgtcctgagggtgtgagcgcatggctgcctgcagtccgagcagagtcctctgtatgctgtcaagggaggggccagcctgtcccctgctttccctgtgctctgggagggccccacaggctctggctgcgcaccgccgtggcgtggcaggcatgctgtataggagttggtagtcgagtcatttttcttttcttcccctttagtggaagaaacactggtttgtcctcgccgatcaaagcctgagatactacagggattcagtggctgaggaggtgagtgtctgggctttgcctctgctgtggagacagctggaggggtccaggcggcatctggggctagtagatctgcttccccctgggctaatgtccccacttctgaggacagcgcccttcggtggtgttaccttgccgaaggtatgtccatgttgccctcttgggtttcccagtcccgacctggtgggaaggtgagcacaagaccagcctttgtccttgtgatcattttcctggctgtgatgctgggcttcgtcaaggccttgaattaagtgcccagtgcagtgggtttgggcagcttttcttttctctgttctttgaaaaacactgaaatttgaaaactcaggatgaacaattttgttttttccacaaagagatttcatggtaaatggagttggaagaattgaactacatcttgtgccctgccttctggacaaggacaggataggatagatgagcttttttgggcccctggacagtcctgattctgtggtcaaggaccaaatagaaggggttctttttttcttcacctacaaataaaataacctcttctaaacagtttggcaagtctcctttgccttttccccagtagtttcactccaggaatccctcagataactcccacatgtggaaaaacgtctgtttcaggttagtcattcccacacgtttgtaacagccagatgattggaaagagcctaaatacccatcattaagggccgggatatgtattaaatactctgagccagtctttacagactgaaggagaaaaggtggtagtgataagaagtaggggtaggagagtgtgggcggtgggcc

SEQ ID NO: 2352 - DNA, 1200 bp, Homo sapiens
  misc_feature (1)..(1200): DMR17:17518201
ctgtctcctcccacagccaggagggaggaagggctgcagcccagtcctgtgaagcccgttcgagccctgcctggccatccacgcctcgcccacccccgtgggctttctcgagaccagccttgtggctcatcagagggtagcggtccagccaaagctggccaagttcagctgtgcagggggcagctcaggcaagggacttcaacaagtgccccggagcccatcagccttcctccccattcacactccacagccagagcaaacaggtctgtgctaatggccccttcgggactggatggagcacacctgcttccagataacagtggctcatcctgccccgggcctcccctgaccacctctggatgcactgctggtgcagacctgctaacatagtgacctactctcccctgggacccgctggcaggtcagctgctggtggcctctcggacatcccatccatgacccaggcttggctcaagcacgtgcctgtgttctctgcccaccaaccgactcctgctgggtgcagaggcttttgagcacagcctggaccccacaaagcttgccatctcccatggagaacgatgccacaccccaaaggtccagaacaggcacactcatggggacagaaagcagacgagtgctgccagggactggggggcgggagatgactgctccaggcctatagggtgaggaaaaagctccgaaactagtcaggaggaagggctgcacaacatcgggaagctgctaaatgtcactgaattgtaaagcttaaaatggttcataacagtttatgttatgtctattttactgcacaaaaaagaatacccacctctagacagccactgaagcgaggcatgcatgggaaagggtgtgggggtgtggggtatgcaggagctggtcccgagggtcctgtcagagcctggcccaacagcccggtccggctccagcacctgccacctgtgtgcctcacactggcaggtgtgggcgggaaggatgggtcaccagggacatggcaggatagggtgcaggcaggggcctggaggggaagaacagtgggggagagagtgaggaccagggcacacctctgcctctgaacacaaaaggtgagaggagaaaagcagcccaggacatcctttctctcctccccaaaatccaggggtggccagttcaaccaaaagtcatggccctgctggctgggcagat

SEQ ID NO: 2353 - DNA, 2000 bp, Homo sapiens
  misc_feature (1)..(2000): DMR17:18439601
aagccacctgtgccaaggccccactggccccaagggctccaggaacgggagcctgattcccggccacctagcctgagtcaccaccgactcgcatttgtgtgtttttctctcagctccacactctcaaagctgggtgggaactctgagccagcacacagcggagttgatcctgggctgaataatccagagtgaggagttggacgggactgggagtgatgaaatccagaggggaacctggagtcagcagttaggagggccccgccttccccaggtgcatataaaggtctctggggttggaggcagccacagcatgctcttagccttcctgagcaccttcccttttttcagccaactgctcgctcgctcacctccctccttggcacgatgagcacctgcagccaccagttcacctcctccagatccatgaagggctcctgcagcatcgggggcagcatcgggggcggctccagccgcatctcctctgtcctggccggagggtcctgccatgcccccagcacctacgggggggcctgtgtgtctccttctctcgcttctcctttgggggagcctgcgggctggggggcggctatggcggtggcttcggcagcagcagcagctttgctagtggctttgggggaggatatggtggtggccttggtgctggcttcggtggtggcttgggtgctggcttgggtggtggctttgctggtggtgatgggcttctggtgggcagtgagaaggtgaccatgcagcacctcggtgaccgcctggcctcctacctagacaaggtgcgtgctctggaggaggccaacgccgacctggaagtgaagatccgtgactggtaccagaggcagcggcccagtgagatcaaagactatagtccctacttcaagaccatcgaggacctgaggcacaaggtgggtgactttggtgtatggagcactgagagaggctggggctatagtgtcccttgggatacctctttttagcaattgcactttacaaacagggagactgggcacctttggggagtagccaggatcatccagggaagtggtggcagagggtcccttttcagcatctctgtgcccggactggggctgttaccctgaatctcttatttcctgcaagggttcagctgcaagttccgcttccctgccttgggcccaggaagggggtgatcgggatggagtgcatccctgcataccctgagctggtggagaaggcatgccagccctgccagccagaagacttccagatttgaggaggttccttttgcccctttctgcctttcacgctcaagtagtaaggtccttgcctgaccagggctcctgtcctccatccccactccagatcattgcggccaccattgagaatgcgcagcccattttgcagattgacaatgccaggctggcagctgatgacttcaggaccaagtgagcagccagcatggtgggctgggggcagagggcaagggacaaagagtggagctgtccacccagcagggccagcagaccccgagcctcagaatcctcagggctgcagcctaaggacctgacctctgtcctgccagttaggagcacgagctggccctgcggctgactgtggaggctggcgtcaatggcctgtgccgggtgttggacgagctgaccctggccaggactgacctggagatgcagatagaaggcctgaaggaggagctggcctacctgaggaagaaccactaggaggtgtggttgctgctggcttccgggatgggaggctggtttggtggggttgccagatgcacccagggccaggagaggagtctgctgagctgaccgcctcctgccatcccttcccaggagatgcttgctctgcgaggtcagaccggtggagaagtgaacgtggagacggatgccgcacctggcgtggacctgagctgcatcctgaatgagatgcgcaaccagtacgagcagatggcaaagcacaaccacagagatgctgggcctggttcctga

SEQ ID NO: 2354 - DNA, 800 bp, Homo sapiens
  misc_feature (1)..(800): DMR17:18568201
gtggtccgtctgttcctgtcccctgtgagatccagcactgaggcacaaaggacaggagagggtggggaggggtggcagcgtgagtctcactgggtgtgagctggccagccccctggctcagtgctccctcctccacctcctttgaacgggggacataccatgtggctaagaagggcaactcagcatctgccgctcaggctaggtggacagtgaggaaggggacatgggaggtctgaggcttcaaggctagtgtctccacaggcgctggcagtgatttcttttttaagctgctctccctcccttccctccgcctgcctccatcctaattgaagccatcgcctcttcagttacactgcttcctaaaatagtgttctgatcacgccctgggtgctcactgaaaatgcttcaggggctccctgccatctattggaaaaaggcagaaatccttaggctggcgtgccagggtccaatcagaaaagcgaaacccacctgggatgtttccgcagagggaacttcgtgtagggcattgttatgggcgtgggaagactgaaagggcaaagagagaccgctgggacagagagtggcagaagcagcttccacccctgcagccagagggacagaaggaaggcaggtttggaggagggcccgggtctctgatggggaagaagggccgctgctggtaagtggtgggagaaacagccttggggatggcaggtaaacctgtctcctgcctcccaccttcccttctccatctagtgtccccttgtggggaaatttaacagggaacccagagacgaaag

SEQ ID NO: 2355 - DNA, 1000 bp, Homo sapiens
  misc_feature (1)..(1000): DMR17:19616201
cagctaatttttgcatttttagtagagatggggtttcaccatgttggccaggctggtcttgaactcctgacctcaggtgatctgcctgcctcggcctcccaaagtgctgagattatagatgtgagccaccacgcctggcccagttttattattttcaagtgtgctttcctagtgtcatctgacctcactgattttagaccaatgcctaaacgtattcttataaaatctcaggaccaaggaggtgatcagatggagtaatagggactggatttacctttctgctttaaacaactaaaaactggccaacacatacatataatatgtatatatatgtatgtatatataatatataatatgtatatattatgtatgtatatataatatataatatgtatatattatgtatgtatatataatatataatatgtatatattatatatgtatgtatatatgtataaatgtatatgtatatatgtacattatatatatatatattaaaatatatatatatattttaaaatagttttcaatcccttgaggccaggagtttgagaccagcatgggcaacatagcaagacccatctctacaaaaactacaaaaattgcctagatgtggtggcacatgcttgtagtcccagctctgtgggaggatcacctaagcccaggaagttggggctgcagtgagccatgattatgctactgcactctagcctgggtgacagagcaaggccttatcttaaaaaagaaaaaagttttcagacattggacaacaggcagcccaaagaggggaaaaaaatgagagaacactatgattacccagtgtactaggggagagtttccaggccatagcacaggaagagggaaagccctgctatctctgtgagatgaagaaatggagttgggagttttgggaggccatgtgacttgagttcacaaggcaggggaccagagaggagagagtttgagagggagtgctttcaagatcttggctgggcacag

SEQ ID NO: 2356 - DNA, 300 bp, Homo sapiens
  misc_feature (1)..(300): DMR17:19665901
gatgcgatggcccagtttggcaggaccatctgttcctggttaaggaaaccttgtcctatgaccaaggagccttgacctatatagccacaggtccttgtctaggaggtaaacatattgccagcacccagcacagtgactgacatgagtgagggacaggcgggaagaggccaattggtaggtattgccagatccaaattggaaatggtggtggcttgtagagggtggtagcaggggagatagtggaaagggaagggggtatttttgggatcaagcagcaggattggctgatggagtgaatgt

SEQ ID NO: 2357 - DNA, 4300 bp, Homo sapiens
  misc_feature (1)..(4300): DMR17:21002201
cccagaggagccaggcacacagggcgggcagcaacataaacggcacccattaaaaagcaagactcgctcttgagactaaaggagaagttacctaaatttctgtataaactcagtaattcattcactttactagtattacatttatgaaattcacctttgtggaaaaaggagcgggagagggataagaaaatgcctgtttctagaaaaccgcgagatgcttccacgtgcagcttgatgctgttacctgcagaacagacacgcttgaaaacgcgacgtagtgtccgtacttccgaagctaggaggctgcttcacagccgctgagaaaatggaggtgaagagttccatactctccgtattttaacactaaaacaccaacagaaaggcatctgcaaggccctctgtcccgcacactacacctctgtgtccagcttactgctttcatggacccataatcttacagcaggtaggggcctttccacaccgagtgctggggaacgccaggcagcggtcactctgtgctgtgaggcccccgttgcacccccatgtcatgacacaagagatgttctggtgacgggtgtacgctgctcctcccacccagagcacacccctcatctcatccatcttcaaagcagctccaggagcctccccgtccgtgtggtccatcccgacccgatgggtcccaggtgcagaggggccacatctgcatgggaggtggtgtcaccaggccggggaggcggcgggagacttgggggaggggggggccagggaggatcactttgtgaggcttgccaatgcattgcctttgtttttctgaccagctgcagataaggctactcgtattccaggaactgtttgtgatagaacagcaagtacctgtggaggcagagagagggaggaggctcacctctaactcctaagacaggagccagaacaacccaccctacacaaaagcctacgtgctctgcgctctgcacaggtcggccaggcccgagttgatggttttggctttttagtccgcaaggaggaaagagtgcttcactggctggtggcactggccctgcccatctctgcagcccgaccaccacccccacctgccacgaggtcacccattgcctcacccaacctcccacagcctctcccccacttgtgacagccccacccttgtgcagagcccactgttttcaagtggctccgtccagatccacctcatcgccctgaaggctgtcctttatcccagattcttccaaataaaacctctcaagagggcttggcttccgtgttgctcagaatgtgaagtgcaaagccctcagggagttcatggcagctggggtccccctgacccctggagggtcaacaggtttctctatgccatgaaggaatgaaactggaaaggagaggagctgataaagaactgatgtgggccgggcccggtggctcatgcctgtaattctaacactttgggaggccaaggcaggaggattgcctgaagtcaggagtttgaaaccagcctggtcaacatggtgaaaccccatctctactaaaatacaaaagtaggcaggcgtgatggtgcatgcctataatcccagctacttgggaggctgaggcaggagactgacttgaacctgggaggcagagggtgcagtgagctgagatcatgccattgcactccagcctgggcaacaagagcgaaactccgtctcaaaaaaaaaaaaaaaaaaaaaaagaactgatgtgttcagttcacgcagttaaaaaacaactgctctgacgttctctgtgctaagggaatgcctccagagagggcctttgctcaggcacctcttctcccacctgagcacccatcgaggctggcatcctatccagaacaggcttcattacttcggcaaatgaaggtcaacaccttcgagtggttctaggctcagacatgggctagtctcagctataccggaggggaagcaccgtagccaccgtagggccttcctcccaccccacaggacgcacccttcgctgtccaggacgtccttgatgctggccttggtgatgatggcatcgtcacacttgaaccactggtctttgtgctgccggataaagctggtgtagtggccactctccaaggtcccttgatggttaacaacagcaaacagggaatacctagtgcaggagcaaaggagagggagggcgcaggtgacttgatgccgtcacttgaggtcatcaccatcagaaaccaggcagcccaggcagggagcgggaggcctgtgggcctgtcaacccccagggcctcaggctgatgcacaggaggctgcaggaactaagggagcctggtcaccccccttggctctagcccgggtccaggcgcttcctggaactccatctagtgggagtggtgactgcagtcagcagtggggatcctggaacaccccagcctttcatactttctacaaccccaaggcaagaagaatgaacaccgagctttccagatggaacctccctcctgccagaggccaagagtggggctgggctcctccaacaggagggagcatttgtggcaccacgtggagcggcctttcctagtggagctgcgggcagccaatagtggagctgcgggcagccaagcgggaagcaggtcagtggcgggggatccgctgggcgccctacaaggcagacaggagcccacccccagctcttggccagaggccctggacacccacaccgctaagcaccacttacttgttgtcattgttgagactgtccgtgggctgctggtactgtccattcatcctgctctctttgctgtaacagacaacggcaggattcagcatcattaaaatcatcaggcccagagacacaaggctctcgtgaaaccaacacttatccaagcttgaccatgcagatgctgcaccgaggtgcactttatgcttcaggcagaaatctccccatgtttcgtgaggacactgacgctcaagctgtggaggcccctgcctcagagcacacctgggtcctgaggccacctggcgtggcccctggttcttccaaggtgggtcctgaatagggctggtaatgggagctggatctggaggaatgtgagtttggtttgtgacaaagcagatggtgaaggtgctcttcctcccacatgtaaagggttagcttgaaagggtacgctgaatccattctacaacctaggcaggtgcctcctcaaaagggacaaagattgctgctcattatttcatgaccagcacctcccctggtgagatgggggagaggagtgctgggaacaggaagccatgcacattatttactgcattttcctacagctgtgtttggcaggaaacaccaagatctttgagaccctgaccttagaacagtactgtcacctccctcagtacgtgaccatcgtggtcagactgatgatatggagctctgactctggtcttgttttattcaggaggtcatctgtgtgccacaggggtgggacagccatgagaggacaccaggaagaggccgctaactaccaaaaagcaacatgctttccacggtgctggggctgggactgtggccaccaaaaaataacaccctgcaaataacaacatccacgtctcaaccctcagaacctgagactgggacctcatttgtaaaaccagtctttgcagagactcaaagtaaagatgttgagatgagatcctcctggatgatctgcctaggtcctaaagccaatgaccacggtcatgacagagaagcagagggaactggacacagagtcaggggagctggccatgtgacccggaagccaggggagtgacagccacagaaggaacacgtggaaccaccagcagctggaggcggtgaggaatggaatccccaagacccttgtaggacatggagccctgccaacaccttgatttcagatttccaacctctagaactgtgaggaaattaattttaagccgccaggtttttggtcatttgtcacagaaccacaggaaactcctatgtgtctcatgcattagtaagcagctgaattccaagtaccccagaataggcagatttgaaaaggaaaatgcaatctacaactgcaaaaccaactatgtctgcctgtacttcaacatctgttccacgaactaaaatgttgccttctcgctgtgatcccaccttgaggactttgccggtttgaaagtggattgataattgttgagaaattcaaaacaaaaacagggtatctgatgaaaaacaactcattaacatgtgctgtatcttaagatcaggataaacagatttggggaaggtggggtttatattagtatcg

SEQ ID NO: 2358 - DNA, 2300 bp, Homo sapiens
  misc_feature (1)..(2300): DMR17:22048101
tatgcaccttgaacctgctgtctacctagggcccgatgtccatgttaaggctgggtgtccacctgggacctgggtgtccacttggggcctaatgtccacctaagacctagtgttcacctagggcctgggtgtccacctggagcctgatgttcagctggagatgcatccacccgagacctaggtatccacccagggtctggtgtcgaactggggccttatgtccaccgggggactagatatctacctgaggcttgatgtccacctggagcccatatccacctcagagctgggtgtccacccaggttctggtatccacccggagcctggtgttcatctggggcccagtgcccacctggaacctgggtatcaccatggggcctgggtgtccacttggagcgtgatgtgcacctgggacctgagtttccacctagggcctgatgaccacctggggtctgatgtctacctgaagcctaggtaaccacctagggcatggtgttacctgtgcctttatttccacctgagcctggtgtacacctggggcctgggtgtccatctgaggcctgatgtactcctcaagtccagtgtccacttgtggcctgatgtcaacttggaagctgatatccacctggggactgatgttctcctggggtctgatatccaactgggatcagatgttcacctaaggcctggagttaatctggggcctgatggtcaccagggtcccaggtgtccacctagggcctagtgtccaactagggcctgatgtccacctggagtctagtatccgccttggccttgatgctacttgaggcctgggtgtcttcctagaacctgagtccccaattgggccctgatgtccacctgagacctggtgtccttacagggtctgatatctacctaaggcctgggtatcctcctgcagcctgatgctcacctgtaggctggtgtccatatggggcctgggtgtctacctgtgagcctgatgtacacctggagtccagtgtccccttggttactaatacgtaccaggaaaatggtatatacctggggcctgatatacacctggagcctgcatgtccacctgagccctgatgtccacctggggcctatattcacccactacccaaagtcaagtcgggaaaagggcccagaataggtgaggagcacaggtcaaagcctctcagtcctgcttgtatttctccaagagtgatctggagaccaactgcatcagaactgtggggtgaggtcacagcccctgcctgtgagaagtacagattcctcttcctggaccagaatccctgggaactggacccaggaatttcccaagatctctgggggactctgagacagcccaagtatgggaactgcagatttcctcctgaaaagggagcactgtctcaaggggtccaggtcacccaactctaccttgtagccaccagaccagtctgagccttggagaatgctgctctttcctcctggaatgcccttcccagcgttccttgcctggtaactctcacacatccctcaagacccaactcaagggccacctcctcctgacgtcactccctgaactttctcctgtgtttccactctcctcttcaccaagtgatgttgacatttctatgggaccatctctctctagacaagaaacgcctacagttgcagccccctgtagtgcaatttgtgtcagtctgggaagagtggatttggagcccaaccaccattgaggaaaatccgtctgatggacatggcgggttccagcccagatgcaggggtcagcgaggggtgatgtgacagtgagcacagaccctgggtggtggtgacagtggctgtcatggggaggaaaggaatggaaaaaggacctcatgggagcagaaagacaggccttagctgcagatgggccaggaccccacaaggaatccagaacccgcatcctaatcccagctctgctgtaagtccacagcggaaccctggcagtgactttcccctttctgagcctcattttactcatcagtaaaatggtgacgataactccaacttcaccaaggagatgcaaggctcaatgagatgatggatctgaaaatgccttgtgtttcatggcacaaaggagagggattcctgacatgcgacaagcgcagggagagaggaaggatggggtctgtaaatggccaggtggcagcccacccctccacacacacaaacacccaccgtgtcacccacactggtgattttcccaggagctcccctggcctggaattagcactgtcagtgggcagggaggactgtcgtgccattacagg

SEQ ID NO: 2359 - DNA, 100 bp, Homo sapiens
  misc_feature (1)..(100): DMR17:25512301
agtttcgaaacacactatttgtagaatgtgcaagtggatatttaggcctctctgaggatttcgttggaaacgggttaaaccgcacagaactaaacagaag

SEQ ID NO: 2360 - DNA, 300 bp, Homo sapiens
  misc_feature (1)..(300): DMR17:26100801
cacagtgctgaacctttctttgatagtgcagctttgaaacactctttttgtagaaactgcaagtggatatttggtcctctctgaggatttcgttggaaacgggataaaccgcacagaactaaacagaagcattctcagaaccttcttcgtgatgtttgcattcaactcacagtgttgaacctttctttgatagttcaggtttcaaacggtctttctgtagaaactgcaagtagatatttggacctctctgaggatttcgttggaaacgggataacccgcacagaactaaaacagaagcat

SEQ ID NO: 2361 - DNA, 20800 bp, Homo sapiens
  misc_feature (1)..(20800): DMR17:26792001
  misc_feature (13756)..(13775): n is a, c, g, or t
ttgaggggaatcgcatggaatggaatcgaatggaatggaattgaattgaatggaatagaatggaatggactcgaatggaatggactcaaatggaatggactgaaataaaatggattggaacggattggaatcgaacggaatggaaaggagaggaatggattggaatggactcaaatggaatggaaaggaatggattggaatggactcaaatggaatggagtcgaacagaatggaactgaatagaatgctatctaatggaatggaatgaatggaattgaaaggaatacaatggaatggggtgcaaaggaaatttaacgaatggaatggaattgaatggaatggacaggaatggacttgaatggaatggactggagtggaatggacttgaatggaatgggctggagtggaatggactcgaaggaaattgaaacgaatggaatggaatggaaaggaatagactggaatggaatgggatggaacgcaaaggaatggaatggaatggagtcgaatggaatagaatcgaatggaatggcatcaaatggaatggaatggaatggactcgaatagaatggaatcgaatggaatagaatcaaaatgaatggcatcaaatggaatgaaattgaatgaaatggaatggaatggacccaaatgtaacggaatcgcatagaatgcactcaaatagaatggactcaaaaggaatggtcttgaatggaatttattagaatagaatgaaatcgaatggaatcaaatagtattgaatggaatcgaatggaatggaatcgaattgaatggaccggaatggaatggactgtaatagactggactcgaatgtaatggactgcaatgtgattgatgtgaatggaatggaatcgaatggaatgtaatcaaatggaatggaatggaatcgaatggaatgccatgtaatgtaatggaacggagtggaattgagtggaatggaattgaatggagtagaaatgaatggaatggaattgaatgcaatggattcgaatggaatggacttggtacaaagtggaatcgaaaggatgggaatccaatggaatggaatgaaatggtatgaaatggaatagactcaaatggaatggagtcgaatggaatggacttgaatgtaatggagttgaatggagtggaatggaatggaatggaattcagtggaacagagcacgatggaaagatatcaaatggaatggaatggaatggactcgaatggaatggactggaatggaatggactagaatggaatggacaggagtggaatggactcgagtggaatggactcgtatggaatggaaacaaatggaatggaatggaaagaattataatggaagggaatcggattgaacggaatggaatgtaatggagtcaaaaggaatagaatcgaatggaatggcatcaaatggaatggaatggaatggagtggaatggattcgaatggaatagaatagaatggaattccgtcgaatggattggaatggaatgaaatggaatggacccaaatgtaatggactcaaacggaatgcattcaaatagaatggactcgaatagaattcattcaaatagaatcatattgaatggaatgcagtagtattgaatggaatcaaatggaatggagttgaatggaatggaccagaatcgaatggaatggagttgaatggaatggactggaatagagcggactcgaatgtaatggattgcaatgtaattgattcgaatgaaatggaatgtaatacaatggaatggaatggaaaccaatggaatgcaatagaatgcaatgcaatggaatggaatggagtggaatcgggtggaatggaatcgaatggaatggaattgaatggtatggaattgaatggaattgactggaatggaatggactggaacaaaatggattggaaaggattggaatctaatggaaaggaatggagtggaatggactggaatggactcaaatggaatggagtcgaatggaatggaaccgaatggaatgcaatcgaatggaatcgaaaggaacagaatggaatggagtgcaatggaaagttatcgaatggaatggaattgaatggaatggactcaaatggaatggactggagtggaatggaattgattagaatgggttggactggaatggattcgaatttaatggaatggaaagaaatagactggaatggaatgggatggaacggaatggaatggaagggaatggaatggaatggagtcaaatggaatagaatcgagtggaatggcatcaaatggaatggaatgcaatggattcgaaaggaatggactcgaatggaatagaatcgaaaggaatggcatcgaatggaatgttattgaatgaaatggaatggaatggacccaaatgtaatggactcgaatggaatggactcaaagagaatggactcgaaaggaatggtctcgaatggaatttattcgaatcgaatggaatgaaatagtatggaatggaatggaatggaatggaatggaatggaatggaatagaaaggactcgaatgtaatggaatgcaatgtgattgattcgaatgtaatggaatcgaatcgaatgtaatcaaatggaatggaatggaaggaaaaagaatggaatagaatggaatgcaatgtaatggaatggaacggagtggaattgagtggaatggaaaagaatggaatggaatcgaatggaatggattcgaatgtaatggacttgggacaaaatggaatcaaatggattggaatcgaacggaacggaatgaaatggtttggaatggaatggactcgaatggaatggagtcgaatggaatggactggagtggaaaggactcaaatgtaatgtaaacgaatggaatggaaaggaatagaatggaatggaatcggatggaatggaatggaatggaatggaatggaatggaatggaatggagtagaatggaaaagagtcgaatggaatggcttcgaatggaatggaatggaatgtactcaaatggaatggactcgaatggaatagaatcaaatggaatggtatcaaatggaatggaatggaatggaatcgaatggagtggatgcaaatgtaatggacttgaatggaatggactcaaatagaatagaatcgaaaggaatggtctcgaatggaattaattcaaataaaatggaatcgaatggaatgcaatagtatggaatggattcgaatggaatggaatcgaaaggaatggaccagaatggaatggaatagaatagaacagactcgaatggaatggattgcaaagtaattgattcgaatgtaatagaattgaattgaatgtattcaaatggaacagaatggaatgcaatggaatggaatagaatggaatgcaaaggaatggaatggagtggaatcgagtagaatggaatcgaatggattggaattgaattgaatggactggaatggaatagactcgaatggactagactggaacaaaattgaatcgaacagattggaatcgaaaggaaaggaatggaatggaatagaatcgaatagaatggagtcgaatggaatgaaattgaattcaatgaagtcgaatgaaatggaattgaatggaatccaaaggaatagaatagaatggagtctaatggaaagatattgaatataatggaaaagagtggatgcgaatagaatggactggaatggaatggactcgaatggaatggactggagtggaatggactcaaatggaacggaaacaaatggaatggaaaggaatggaatggaatggagtagaatggaaaagaatcgaatggaatggcatagaatggaatggaatggaatgggctcgaatggaatggaaccgaatggaaaagaatacaatggaatggcatcgaattgaatggaaaggaatggattggaatggaatggaatggtcccaaaggtaatgggctcgaacggaatggactcaaatataatggactcaaaaggaatggtctcaaatggaatttattcgaatagaattgaatcgaatggaatgcaacagtatgcaatggaatcgaatgaaatggaatcgaacggaatggacaagaacagcatggactggaatagaacggactcgaatgtaatggattgcaatgtaattgatttgaatggaatggaatcgaatggaatgtaatcaaatggaatggaatggaatgcaatggaaaggaatagaatggaatgcaatggaatgaaatggagtggaatcgagtggaatggaatcgaatggaatggaattaaatcaaatggaatcgaatggtatggacctgaatggaatggactcgaaaggaatggactggaacaaaatggaatcgaacgaattggagtctaatggaacggaaaggaatggaatggaattgaatggaatggaatggaatttaatgaaatggaatggaatggactcaaaacgaaagtagttgaatggaatggaatcgaatgaaatggaatcaaatggaatggaattgaatggaatggagtgtaatggaaagatatagaatggaatggaatggaatggaatggaattgaatagaatgcactggaatggaatggacacgaatggaatggactggaatgaaatagactcgaatgtaattgactgcagtggaatagactcaaatggaatggaaacgaatggaatggaagggaatagaatgggaaagaacagaatttaatggaatcggaatggaatggaatcggaagaaatggaatgtaaagtagacgaatggaatagaatcgaatggaatggcatcgaatggaatggaatggaatggattcgaatggaatggactcgaatggagcagaatcgaatggaatgacatcgaatggaacgcaaaggaatggaatggacccaaatgtaatggactctaatggaatggattcaaatagaatggacttggaaggaacggtctcgaatggaatttattcgaatagaatggaatcgaatggaatgccatagtatggaatggaatcaaatagtatgtaatcgaatttaatggactggaatggaatacgctggaatagaatgcactcgaatgtaatggattgctatgtaattgattcgaatggattggaatcaattggaatgtaatcaagtggaatggaatggaatgcaatggaatggaatagaacggaattcaatggaaaggaaaggagtggaatcaagtggaatggaatcaaatggaatggaattgaatgggatggaatcgaatggaatttactggaatggaatggactcgaatggaatgaactggaacaaaatgggaccaaagggattggaatcgaatggaaaggaaaggaatggcatggaatggacttgaatggaatgcattcgaatggaatggaaccgaatggaatggagtcgaatgggattgaaccgaatggaatggaattgaatggaattgaaatgaatggaatcgaaaggaagagaatggaatggagtgtaatggaatatcaaacggaatggaattgaatgaactcgaatggattggactggaatggaatggactcgaatggaatggactggagtggaatggattaaatggaatggaaaagaaaggaatgcaatggaatggaaagtaaaggaatggaatggaatggagtggaatggaagagaatcgaatggaacggctttgaatgcaatggagtggaatggaatgaaatggaatggactcgaatggaatggacagtaatgaaatagaatagaatggaatgacatcgaatggaatggaatggaatggaatggacccaaatgcaatggactcgaatggattggaatcaaacaaaatggactcgaaaggaaaggtctcgaatggaatatatttgaatagaatggattcgaacgaaatacaatagtatggagtggcattgaatggaatggaattgaatggaatggaccggaatggagtggactggaatagaatgaactcgaatgtaatggattgcaatgtatttgattcaaatggaatggaatcgaatggaatgtaatcaaatggaatagaatggaatgcaatagaatggaatagaatggaatgcaatggaatgtaacagagtggaatcaattggaatggaataaaatgaaatggaatcgaatggaatggaatcaaatggaatggataggaatggaatggactcgaatagaatgtattggcacaaaatggaatcgaagggattggaatcgaatggaacagaatggaatggagtggacagtagtggcatcgactggaatggagtcgaatggaatggcatcaaacggagtggactggaatggaatggaatggaatggacgcgaatggaatggaatcaaatagaatataatcgaatgtaatggaatcgagtggaatggaatggaatggtatggaatggaatggacccaagtgtaatggactcgaatggaatggactcaaagagaatggactcgtatggaatggtctcgaatggaatataatcaaatagaatgtaatcgaatggaatgtagtagtatggaacggaatcaaatggaatggaccagaatggaatggactcgaatagaacggactccaatgtaatggaatgcaatgtaattgatacgaatggaatgaaatataatggaatgtaatcaaatggaatggaatggaatgcaatggaatggaatagaatggaatgcaatggaatggaccggagtggaatcgagtagaatggaatcgaatggaatggaattaaagggaatggaatggaatggattgcaatggactcgaatggaatggagaagaatggaatggaatctaatggaatggattggaatggaatggaattgaatggaatcaaaaggaatagaatggaatggagtgtaatggaaagctatcaaatggaatggaatggaatggaatggaatcaaatggaatggattcgaatggaatggactggagtggaatagactcgaatggaatggagtcgaatggaatggaatcgattgcaatggaatcgaatggaatggaattgaatggaatctaaaggaatagaatggaatggagtgtaatgggaaaatatcgaatggaatggaatggactcgaaaggaatggactggaatggaatggactcgaatggaatggactggagtggaatggactcaaatacaatggaagcaaatggaatggaatggaatggaaaggaatagaatgaaatggaataggttggaacggaatggaatagaatggagtcaaatgaaatagaatcgattggaaggtcatcaactggactggaatggaatgaactcgaatagaattgactggaaaaaaatggaatcgaacggattggaatcgaagggaaaggaatggaatggaatggacccaaatgtaatggactcgaatggaatggacccaaatagaatggactcgaaaggaatggttatgaatggaatttattcaaacagaatggaatcgaatggaatgcaaaagcatagaatggaattgaatggaatggacgggaatggaatggactcgactggaatggactccaaaggaatggaaactgatggaatggaacggaatggaatttaatggaaagaaatagaatggaatagaatcgaatggaactgaatggaatggaatggagtcgaatggaatagaattgaatggaatggcattgaatggtatggaatggaatggaatggaatggactcgaacggaatggactggaacaaaatggaatcgaatggaatggaatgggattgaatggaatggaatggaatggaatggaatacaatggagtccaatggaatggatttgaatggaatgaaattgaatggaatcgaaatgaatagaatggaattgggtgtaatgaaaagaagtcaaatggaatggaatgcaatggaattgattcgaatggaattgactggaatggaatggaatgaaatgaaatggaaaggaatagaatggaaacaaatcagatggaacggaatggattggaatggagtcaaatggaatagaatcgattggaatgtcatcgaatggaatggaaaggaatggacctgaatggaatggactcgaatagaatggaaatgaatggaatggaatcaatggaagtgaatggaatggaatggaatggaatggaacagaaaggaatagaatgagatggaatctgttggaacagaatggaatcgaatggagtagaatgaaatagaatcgattggaaggtcatcgaatggactggaatgtaatgaactcgaatagaattgactgagaaaaaatggaatcgaacggattggaattgaagggaacggaatggaatggaatggacctaaatataatggactcgaatggaatggacccaaatagaatggactcaaaggaatggtttcaaatggaatttcttcgaacagattggaattgaatggaataccaaagtatagaatggaattgaatagaatggacgggaatggaatggactcgattggaatggactggagtgaaatggactccaaaggaatggaaactaatggaatgaaatggaatggaatttaatggaaagaaatagaatggaatggaatcagatggaactgaatggaatggaatggagtcgaatggaatagaatcgaatggaatggcattgaatggtatggaatggaatggaatggattcaaacggaatggactggaacaaaacggaattgaacggattggaatcgaatggaatggaatgggattgaatggaatggaatggactggagtggaatggagtccaatagaatggaaccaaatggaatggattcgaatggaatggaattgaatggaatcgaaagcaatagaatggaattgggtgtgatggaaagatgttgaatggaatggaatgcaatggaattgactcgaatggaatggactggactgcaatggaatggaatgaaaagaaatggaaaggaatagaatgaaaaggaatcggatggaacggaatggaatggaatggaatggaatggagtcaaatggaatagaatcgattgtaatggcatcgaatggaatggaaaggaatggacctgaatggaatggactcgaatagaatggaaatgaatggaatggaatcaatggaatggaaagtagaatggaatggaattggatggaacgaaatgtaatggaatagagaagaacggcatagaatctaacggaatggcattgaatgaaatggaatggaatcaaatggaatggaatgtaatgtacccaaatataatggactcgaatggaatggacttaaatagattggacacgaaaggaatggtctcgaatggaatttgttcgaataggatggaatcgaatggaagccaatagtatggaatggaatcgaatggaatagaatcgaatggaatggacaggaatgaagtggactggaatagaaaggacgcgaatgtattgtattgcaatgtaattgatttgaatggaatggaatcaaaaagaagtttatcaaattgaatggaatggtaagcaatggaatggaatataatgatatgcaatggaaaggaacagagtggaatcaagtggaatggaattgaatggaatggaatggaatggaatgcaatcgaatggaatggaatggagtggaatggactgcaatggaatggactggaaaaaattggattcaaatggattggaatcgaatgaaatgtaaagagatggactggaatggaatggacttgaatcgaatgaagtcgaatggaatgaactggaatggaagggaatggaatggaatggaatcaaaaggaatacaatggaattgggtgtaatggaaagatggcgaatggaatggaataaaatggaaggtacttgaatggaatggaaacgaatggaatggaatggaatggaatggaatagaatggaacgcaatcggatggaatggaatggaatcgaatggagtcaaatggaatagaatggaattaaatggcatcgaatggattggaatggaatgcaatggaatggaatggacatgaatggaatggattcgaatggtatagaatcatttggaatggcatcgaatggaatggaatggaatggaatagaatggaataaaatgacattaaattgattggaatggaatgcaatggaatgtaactgacacgaatggaatggactcaaatggaatagaatgatttggaatggcatcaaatggaatggaatggtatggaatggaattgaatggacccaaatgtaatggactcgaatggaatggactccaatagaaaggacaaggaatggtcttttctgttccttctcgaatgcaatttattcgaatggaatggatgagaatggaatgcaacagtatggaatggaatcgcatcaaatggaattgagtgaaatgcaatggaatggaattgaatggaatagaacggactcgaatgtaatggattgtaatgtaattgattcgaatggagtggaatcgaatggaatataaccaaatggaatggaatggaatgcaatggaatggaatagagtggaatgaaatggaatggaacagagtggaagagagtggaatggaaccgaatggaatgcaattgaatagaatggactggaatagaatggattggaacaaaatggaatcgaatggaatggaatggaacagaatggaatgcaccccaatgtaatggactcgaatggaatggaatcaaatacaatggactcgaaaggaatggtctcgaatggaatttattcgcatagaatggaatcgaatggaatgcaatagtgtgcaatgaaatcgaatggaatggaccggaatggaatggagttgaatacaacggattcgaatgtaatgcatgacaatataattgatttaaatgcaatggaatcgaatggaatgtaatcaactggaatgcaaaggaatgcagttgaatggaatagaatgtaatgcaatggaatggaagggagtggaatcgtgtggaatggaatcaaatagaatggaatcgaatttaatggaaccgaatggaatggactcgaatgaaatggaattgaacggaatggaatggaatggaatggacactaatggaatgggttcgaaaggaatggaaccgactggaatggaattgaatggaatcgaaaggaatagaatggagtggcgtgtaatgcaaagatatcaaatggaatggaaaggaatgaatggaatgggctcgaatggaatggactggaaaggaatagactcgactggaatggactggagtggaatggacttgaatggaatggaaacgaatggaatggaaaggaatagaatggaaaagaatagaatgggatggaaatggatggaaggaaatggaatggaatggagtcgaatggaatagaatggaatggaatggaatggcatcgaatggaatggagtggaatggaatggaatggacacaaatggaatagaacagaatagaatggcatggaatggaatggattggattgaatcgaatggacccaaatgtaatggactcgaatggaatggactcaaatagaatggactcaaaacgaatggtctcaaatggaatttattcgaataaaatggaatcgaatgcaatgtgatagaatggaatggaatcgaatggattggattggaatgaaatggactggaatataatgtactcgaatgtaatcaattgcaatgtaaaagatttgaatggaatggaatcgaatggaatgtattaaaatggaatgtaatggaatgcaatggaatgtaataaaatggaatgcaatggagtggaacggagtggaatcgagtggaatggaatcgaatgaaatggaattgaatgcaatggaatcgaatggaatggagtggaatggaatggactggaatggaatggactcgaatggaatggacaggaacaaaatggaatggaatggattggaatcgaacggaatagaatggaatggaatggaatggactcgaaaggaatggagtcgaatggaatggaattgaatggaattgaaaggaatagaatggaaaggagtgtaatggaaacatatcgaatggaaatggaatgtaatggattcgaatggaatggactcgaatggaatggactggagtgcaacggactagaatggaatggaaacaaatggaatggaatggaaaggattagaatggaatggaatcggatggaatggaatggaatggagtcgaatagaattgagtcgaatggaatggcaatgaatggaatggaatggaatggactccaatggaatgtactcgaatttaatagaatcgaatggaatggcattgaaaggaatggaatagaatgaaatgcaatggactctaatgtaatagactggaatcgaacggactcaaataaaatggaatcgaaaggaacggtcttgaatgaaatttatttgaatagaatggaatggaatggaatgcaatagtatggaatggaatcgaatagaatgaaacagaatggaatagactggaatagaacggactcgaatataatgtattgtaatgtaattgatttgagtggaatggattcaaatggaatgtaatcaaatggaatgaaacggaatgcaatggaatggaatagaatggaatgcaatggaatggaacggaatggaatcgattggaatggaatcgaatgtaatggaatggaatggactctaatggaatggactgtaacaaaatggaatcgaaagggttggaatcaaatggaatggaatggagtggaaaggaatgcaatgcaatggactcgaatggaaaggagtcaaatcgtatggaattgaatggaatggaatcaaacggaatggaattgagtggtatcaaaaggaatagaatggaatggagtgtattggaaagatatcgaatggaatagaatggactcgaatggaatggactgcaatggaatgaactcgaatgtaatggactggagtggaatggactcgaatggaatcgaaacgaatggaatggaatggaagggaaaggaatataatggattggaatcgggtggaatggaatggaattgaatgaagtcaaatggaatagaatcgaatggaatggccttaaatggaatgggatggaagggactcgaatggaatggactcgaatagaatggacacgaaaggtatgacctctaatggaatttattcgaatagaaaggaatcgaatggaatgcaatagtatggattggaatcgaatggaatcgaccggaatggaatggactggattagaacggactcgaatgtaatcgaatgcaaagtaattgattcgaatggaatggaattaaaaggaaagtaatcaaatggaatggaaaggaatgaaatggaatggaatagaatggaatgcaatggactggaatgcagtgtaattgagtggaagtgaatcgaatcgaatggaatcgaactgaaaggaatggaatggaatggtatggaatggtatagactcgcatggaatgcactggagtagaatggagtcgaatggaatcgaaacaaatggaatggaaaggaatagtttggaatggaatcagatggaaccgaatggaatggaatgcagttgaatggagtagaaccgaatggaatggcattgaatggaatggaatggcatagacccaaatgaaatgaactcgaatggaatggactcaaatagaatggacgccaaagaaatggtctcgaatggaatttattgaaatagaatggaatcgaatggaatgcaaaagaatggaatggaatcgaatacaatggatgagaatggaatggatgagaatggaatggactggaatagaatggactcgaatgaaatggattgcaatgtaattgattcgaatggaatggaatcgannnnnnnnnnnnnnnnnnnntggtatggaatggactcgaatggaatggagtcgaatggaatagaattgaatagaatggaaatcaatggaatcgatgggaatataatggaatggagtgtaatgcaaatatatggaatggaatggaatggaatggactcgaaaggagtggaatggaatggaatggactcgaatggaataaactggagtggaatggactccaaaggaatggaaacgaatggaatggaatggaaagattggaatggaatggaaagcaatagaatggaatggaaacggatggaacgaaatggaatggaaaggagtcgaatggaatagaatcgaatggaatggcatcgaatggaatggaatggaatggaatggaatggaatggactcgaatggaatggaaacgaatggaatggaatgcaatggaatggaatagaatggaatggaatcggacggaatggaatggaatggaatggagtggaatggaatagaatcgaatggaatggcatcgaatggaatggaatgaaatggaatggaatggaatggactcgaaagaaatgaaaacgaatggaaatggaatggaattcaatggaatagaatggaatggaatcggatggaatggaaaggaatggaatggagtcgaatggaatagaatcaaatggaatgtcatcgaatggaatggaatggaaaggaatggactcgaatggaatggagtcaaatggaatagaatagaatggaatggcatcgaatggaatggaatggaattgaatggaatggacccaaatgcaatgaacttgaatggaatggactcaaatagaatggaatcgaaaggaatggtctccaatggaatttattcgaatagagtggattcgaatggaatgcaatagtatggaataaaatctaattgaatgcaccggattggaatgactggaatagaaaagactcgaatgtaatggattgcaatgtaactcatttgaatggaaggaatagaatggtatgtaatcaaagggaatccaaaggaatgcaatggaatgcaatggaatttaatggaatgtaatagaatggactgcaatggaatggaacagaatggaatgcaatagaatggaatgtagtgcaatcgagtgcaatggaatcgaatggaatggaatcaaatggaatggaatcgaatggaatggagtggaatggaatggaatcaaatggaatgaactggaacaaaatggaatcgaacatattggaatagaatggaacggaataaaatggaatggaacggacacgaatggaatggaatcgaatggaatggaattgaatggaatggaatcaaatggaatggaattaaatggaatcaaaaagaattgagtggaatggaatggaatggaaacatatcgaatggaatggaatggaatggagtctaatggaatggattgtaaaggaatggacttgaagggaatggaatggaatggagtcaaaaggaatggactggagtggaatggactcgaatggaattgaaacgaatggaatggaatggaaaggaatagaatggattggaatcggttgggacgcaatggaaaggactggagttaaatggaacagagttgaatagaatgacattgaatggaatggaatggattcgaatggaatggactcgaatgaatagaagtcaaatggaatggcatcaaatggaatggaatggaagggaaaggaatggacacaaatgtaatggacttgaatgtaatggactcaaatacagtggactcgaaatgaatggtctcgaatggaatttattcgaatagaattgaatcgaatcaaatgcaatagtatggaatggaatcgaatggaatggaatcgaaaggaatggagtggaatggaatgcactggaatagaacagactcgaatgtaatggattgcaatgtaattgattcaaatggaatggaattgaatggaatgtaatcaaatggaatggaatggaatgcaatggaattgaatagaatgcaatgcacttgaatggaaaggagtggaattgggtggcttggaactgaatggaatggaattgaatggaatggacaggaatggaatggactcgaatggaatggaatggaacaaaatgtaatggaacagattggaatcgcaaggaaaggaatggaatggaatggaattgactcgaatagaatggagtcgaatggaatagaatcgaatggaatggaatcaaatgcaatggaaatgattggaattgaaaggaatacaatggaatggagtgtaatggaaagatatcgaatggaatggaatggaatggactaaaatggaatggactaaaatggaatggactcgaatggaatggactgcagtggaatggactcgaatcaatggaaacgaatggaatggaatggaatggaatggaatcggatggaaaggaatggaattgaatggaatgcagtcaaatggaatagaactgaatgcaatggcatcgaatggaatggaatggtctggaatggaatctactcgaatggaatggactaaaatggaatggaatcaaatggaatggactggattggaatggaattgaaagtaatgcaatggaatggaatggaatgcaatggaatggaatggaatggaacagaatggaatggaatcggattgaatggaatggaagggaatggagttgaatggaatagaatcaaatggaatggcatcgaatggaattgaattgaatgtaaatgaatggattggactcaaatggaatggcattgaatggaatggaatggaatggaccgaaatgtaatggactcgaacggaatggactcaaatagaaaggactagaaagcaatggtctcaagtagaattaattcgaatagaatggaatcgaatggaatgcaataatatggaatggcatcgaaggtaatggactgcaatggaatggactggaagagaacggactcgaatataatggattgcaatgtaattgattcgaatggaatggaatcgagtggaatgtaatcaaatggaattgaatggaatgcaatggaattgaagaggttggaatgcagtggaatggaacggagtggaatcgagtggaatggaatagaaaggaatggtatcgaatggaatggaatcaaatggaatggactggaatggaatggacaggaatgaaatggaatggaatggaatggactagaattgaatggagtcaaatggaatggaatcgaatggaatggaattgaatggaatcgaaaggaatagaattgagtggagtgaaatggaatgatatcgaatggaatctaaaggaatggacttgaatggaatggattgcaatggaatggacttcaatggaatggacaggagtagtacagactcgaatagaatggaaacgaatggaaagaatggaaaggaatggaataaaatggaatggaatcggatggaacggaatgtaatggagtcaaatggaatagaatcgaatggaaaagcatcgaatggaatggaatggaatgcaatggaatggattcaaatgtaatggactcgaatggaatggattcaaatagaatggaatcgaaaggaatggtctcaaagggaatttattagaatagaatataatcgaatggaataaaatagtgtggaatggaatcaaatggaatggaatcaaatggaatgcaacggaatggaatggactggaatagaactcattcgaatgtagtggactgcaatgtaattgtttagaatggaatggaatcgaatggaatgtaatcaaatggaatggaatggaatgcaatcgaatggaattgaatggaatacaatggaatggaatggagtggaattgagtggaatggaatcgagtggaatggaatcgaatggaatggaattgaatagaatggaatcgagtggaatggaattgaatggaatagagtcgaaaggaatggtctctaatggaatttattcaaatagaatggaatctaagggaatgcaaatgtatggaatggaatcgaatggaatggacgggaatgaaatggactggaatagaatgaactcgaatgtaatggattgcaaaacaattgattcgaatggaatgcaattgaatggaatgtaatctaatggaatggaatggaaagcaaacgaatggaatagaatagaattcaatggaaaagaaagtagtggaatcgagtgcaatggaattgaatagaatggaatcaaatggaatggaatcgaatggtatggaattaaatggaatcgaatggaatagaatggaattgtgtgtaacggaaagataacgaatggaatggaatggaatagaatggaattgtgtgtaacggaaagatatcgaatggaatggaatggaatggacacgaatagaatggactggaacaaaatggaatagaacggattggagttgaacagaatggaatggaatggaatggtaaggaatggagtcgaatggaatggagttgaatggaatggaattgaatagactggaattcaatggaattgaagggaatataattgaatggagtgtaatggaatgatatcaaatggaatggaatggaaaggacacgaatggaatggactggaatggaatggacatgaatggaatagactggagtggaatggaatcaaatgtattggaaacaaatggaatggaatggaatggaatggaaagggattgaatggaatgcaattggatgaaatggaatggagttgaatgggatagaatcgaatggaatggcatcaaatggaatggaaaggaatttattcaaatagaattgaatcgaatgcaatgcagttgtaagaatggaatctaatggaatggaatcgaatggaattaactggaatggaattgactggaatagaacggactcgaatgtaatggattgccatgtaattgattcgaatggaatggagtcgaatggaaagtaatcaaatggaatggaatggaatggaatggaaagaagtggaatctactggaatgaaattgaatggaatggactcgaatggaatggactggaatggaatggactcgaatggaatggaatggaatggaatgtattcgaatggaatggactggaacaaaataaaatcaaactgattcaaatcgaacggaacggaacggaatggaatggaatggactcgaatggaatggattcgaatagaatggaaacgaatggaatggaattgaatggaatggaattgaatagaattgaaaggattacaatggactggagtgtaatggaaacatatcgaatggaatggaatggactcgaattgaaaggaattgaatgaatgtgaatggaatggaaacgaacgttacggaatggaatggaaaggaaaggaaaggagtagaagggtatggaatcggatggaaagaaacggaatggaatggagtcgaatggaataaaatcgaatgcaatggcatcgaatggaatggaatggaatggaatggacttgaaaggaatggacacgaatggaatacaatagaaaggaatggaatggaatgcaaccaaatgtaatggactcgaatggaatggactcaaatagaattcattttgaaaggaatggtcacgaatggaatttattcgaatagaatggaatcgaaaggaatgcaataatatggaatggaatcaaagggatctaaatcgaatggaatggaccggaatggaatggattggaatagaacatactcgaaagtaatggaatgcaatgtaatggaatcgaatggaatggaatcaaatggaatgtaatcaaatggaatgaaatggaatgcaacggaatggaatagaatggaatgcaatggaatgaaatggagtggaatcgagtggaatggaagtgaatggaaaggaatggaatagaatggaatcgattggaatggactggaagggaatagactggaatggaatggactggaacaatatggaatcaaatggattggaatcgaaaggacagagatggaatagagtggtatggaatggacttgaatggaatggagtcgaatggaatggattcaaatggaatggcatcgaatggaatggaatggaatggactcgaatggactggaaacgaacggaatggaatgtaatggaatggaatagaatggaatggaatgaaatagaatggaatggagtcgaatggaaagacatggaatggaatggtatggaatggactcgaatggaatggagtcgaatggaatagaattgaatagaatggaaatcaatggaatcgatgggaatataatggaatggagtgtaatgcaaatatatggaatggaatggaatggaatggactcgaaaggagtggaatggaatggaatggactcgaatggaataaactggagtggaatggactccaaaggaatggaaacgaatggaatggaatggaaagattggaatggaatggaaagcaatagaatggaatggaaacggatggaacgaaatggaatggaaaggagtcgaatggaatagaatcgaatggaatggcatcgaatggaatggaatggaatggaatggaatggactcgaaagaaatgaaaacgaatggaaatggaatggaattcaatggaatagaatggaatggaatcggatggaatggaaaggaatggaatggagtcgaatggaatagaatcaaatggaatgtcatcgaatggaatggaatggaaaggaatggactcgaatggaatggagtcaaatggaatagaatagaatggaatggcatcgaatggaatggaatggaattgaatggaatggacccaaatgcaatgaacttgaatggaatggactcaaatagaatggaatcgaaaggaatggtctccaatggaatttattcgaatagagtggattcgaatggaatgcaatagtatggaataaaatctaattgaatgcaccggattggaatgactggaatagaaaagactcgaatgtaatggattgcaatgtaactcatttgaatggaagggaatagaatggtatgtaatcaaagggaatccaaaggaatgcaatggaatgcaatggaatttaatggaatgtaatagaatggactgcaatggaatggaacagaatggaatgcaatagaa

SEQ ID NO: 2362 - DNA, 30000 bp, Homo sapiens
  misc_feature (1)..(30000): DMR17:26823401
gaatggcatcgaattgaatggaatttaatggaatcgaaatgtatagaatggaatagagtgtaatggtagggtatcgaatggaatggactcgaatggaatggcctggaatggaatggagtcgaatggaatggactcgactggaatggactcgaatggaatggaaacgaatggaatagaacggaatggaatggaaaggaatagaatggaatggtatcagacagaacggaatggaatggaatggagtcaaatgcaatagaatcaaattgaatggcatcgaatggaatggaatggaattgaaaggactcatatagagtggactcgaatggaatagaatcaaatggaatggcatcaaatggaatggaatggaatggacccaaatgtaatagactcgaatggaatgccctgaaatagaatggatttgaaaggaatgatcttgaatgaaatttattcgaatagaatggaatcgaatggaatgcaatagtatggaatggaatcgaatagaatggaatcaaatggaatggatcggaatggaatggactggaatacgacggactcgaatgtaatggattgcaatctaattgattcaaatggaatggaatcgaatgtaatggaatcaaatggaatggtatggaatgcaatggaatggaatagaatggaatgcaatggaatggaatggagtagagtcaagtggaatggaatcgaaaggaatggaatcgaatggaatggactggaatggaatggactcgaatggaatggactggaacaaaatggaaacgaacggatttgaattgaaaggaatggaatggactcgactggaatggagtggaatggaatggaatggaatggaatggaatggaatagaatggaatagaatgcaattgtacggaatcgaaaggaatagaatggaatggagtgtaattgaaagatgttgaatggaatggaatggaatggaaaggaatggactcgatggaatggaatggaaaggaatgggctcgaatagaatggactggagtggaatggactcgaatggaatggaaaagaatggaatggaatggaaaggaaaggaatagaatggaatggaatcggatggaatggaatgaaatggaaccgcatcgaatggaaaagaatcgaatggaatggcgtcgaatggaatggaatggaatggaatggaatggaatggactcgaatggaaaggactcaaatgcaatagaatgaaatgcaatgggaacgaattgaatgtaatgtaatagaacatacccaaatgtaatggactcgaatggaatggtctcaaatagcatggacttgaaactaatggtttcgaatggaatttattcaaatagaatgggatcaaatggaatgcaatagtatgatatggaatcgaatggaatggaatcgaatggattggaccagaatggaatggaatgggacagaatggacaagaatgtaatggattgcaatgtaactgattcaaatggaatggaatccactggaatgtaaacaaattgaatggaacggaatgcaatggaaaggaatagaatggaatgcaaaggaatggaacggagtggaatcgagtggaatggaatagaatgaaatggaatcaaatggaatggaattgaatggaatggactggaatggaatggactctaatggagtggagaggaacaaaatgagaacaaacggattggaatcgagcgcaacagaatgtaatggaatggaatgggctcgaatggaatggagtcaaatggaatggaattgaagggaatggaatagaatggaatggaattgaatggaatcaaaatgaatagaagggaatgcagtttaatgtaaagatatcgaatggaatagaatggaaaggactcggatgcaatggactgcaatggaatggactcgaatggaatggactggagaggaatggacacgaatgtaatggaaacgaatggaatgtaatggaatggaatggaaaagaatagaatggaatggaatcggatggaatgggatggaacggtatcgaatggaatagaatcaaatggaagggcatcgaatggaatggaatgaaatggaatggaatgaaatgaaatggacttgaatgcaatggactcgaatggaatagaatcgaatggaatggcatcgaatggaatggaatggaatggaatgaaatggaatggaatggaatggaatggaatggacccaaatgtaatagactccaatggaatggactcaaatagaatggacttgaaaggaaaggtcacgaatgaaatttattcgaatagaattgaattgaatggaatgaaatagtatggaatggaatcgaatggaattgactggaatggaatggactggaatagaacggactcaaatgtaatggattgcaatgtatttgtttcgaatggaatggaatggaatggaatgtgatcaaatggaattgaatggaatgcaatggaacggaatagaatgggacgcaatgtaatggaacggattgatatcgggtggaatggaatcaaatggaatggaatcaaatggaatggaatcgattggaatggactgaaatggaatggactcgaatggaatggactgaaacataatggaattgaacggattggaaccaaacgaaacggaacggaatggaatggaatggcctcgaatggaatggagtcaaatggaatggaatcgaatggaatggaatggaatggaatggaatggaatggaatggaatcgtaaggaatagaatggaatggagtgtagtggaaagattttgaatgcaatggaatggaagggaatggactcgaatggaatggaatggaatggaatggactcgaattgaatggactggagtggaatgggctcaaatgggatggaaacaaatgggatggaacagaatggaatggaatggaatgaatggaaaggaatagaatggaatggaatcggatggaacagaatggatgggagtgtaatggaaagatatcgaatggaatggaatggaatggactcgaatggaatggatgggaaaggaatggactcaaatggaatggactggagtggaatggtcttgaatggaatggaatgcaatggaatggaaaggaatagaatgcaatggaatgggatggaatggaatggaatgcagtctaagagaatagaattgaatgcaatgccatcgaatggaatggaatgcaatggactagaatgaaatggactcaaatggaatagaatagaatggaatggcatggaatggaatggaatagaatggagtgcaataaaatggaacagagtggaatccagtggaatggaatggcatgggatggaatggaatggaatggaatggaaccaaatggaatggagtcgaatagaatggaatggaattgaatagaatggaattgaacacaatcaaaaggaatagaaagaatggagggtaatggaaagatatcgaatggaatagaatggaaaggaatggactggaatggaatggacttgaaagggatggactggagttgaatggactcgaatgaaatggaaaagaatggaatggaatggaatggaacgattagaatggaatggagtgggatggaatggaatagaatggattgaaatcgaatggaatagaatcgagtggaatggcatcgaatggaatggaatggactcgaaaggagtggaaagtaatggaatggaatggaatggattggaagagaaaggaatagaaaggaatggaattggaaggaacggaatggaatggaatggagtccattggaacagaatggaatggaatagcatctaatggaatggaatggaatggaatggaaaggacttgaatggaatggattggagtccattggaacagaatggaatggaatagcatcgaatggaatggaatggaagggacttgaatggaatggactcgaatggaaaagaatagaatgcaatggcatcgaatgtaaacggatggaatggaatggacccaaatgtaatagactcaaatggaatggactcaaatacaatggactcgaaaggaatggtctcgaatgcaatttatgcgaatagaatggaatcgaatggagtgcaatagtatggaatgggatcgaatggaatggaatcaaatggaatggaatggaatggattaaatgcactggaatagaaaggactcgaatgtaatggattgcaatgtaatttatttgaatggaatttaatggaatggaatgtaaccaaatggattggaatcgaatgcaatggaatggcattgaatggaacgcacatggaatggaatggagtggaatcgagttgaacggaatggaatggaatggactcgcctggaatggactggaatagaatggactcgaatggaatgtactggaaaaaatggaattgaacggattacaatggaatggaatggaatggaatggaatggaatggaatggaatggactggactcaaaaggaatggagtcgaatggaatgtaatcaatggaatgaaatggaatggaatggaactgaatggaattgaaaggaatagaatggaatggagggtaatggaaagatattgaatggaatggattggaattgaatggactcaaaaggaatgcgatggaatggaatggaatggaatagaatggaagggaatcggacagaacggaatggaattgaatggcatcaaatggaatagaatcgaatggaatggcttccaatggaatggaaaggaatggaatggaattgaaaggaatagaatggaatggaaacggatggaatggaatggaatggagtcgaatggaatagaatcgaatggaatggcattgaatggaatggaatggactcgaatggaatggaaacgaatggaatggattggaatgcaaaggaatagaatagaatggaatcggatggaaaagaatggaatggaatggagtcgattggaatagaatagaatggaatggcatcgaatagaatgaaatggaatggaatggaatggaatggaatggaatggaatggaatggattggaatggaatggaattgaatggaatggaatcgaatgaaaaagaatagaatgtaatggcattgaatggaatgggatagaatggaatggaatggagccaaatgtaatggactcaaatggaatgtactcaaatagaatggactccgaaggaatggtatcaaatggaatttatttgaatagaatggaatcgagtggaatgcaattgtatggaatggaattgaatggaatgcaattgtatggaatagaatcgaatgtaatggaattgaatggaatggagtggaatggaatggattagaatagaatggactccaatgtaatgcgttgcaatgtaattgatttgaatggaatggaatcgagtgaaatgtaatcaaatggaatggaatggaatgcagtggaatggaatggaatggaatgcaatggaatagaaaggagtggaatcgagtggaatggaatcgaaagaaatggaattgaatagaatggactggaataaaatggattcgaatggaatggcatggaatcaaacggattgtaattgaatagaatggaagggaatggaatggaatggaatggagtcgaatggaatggagttgaatagaatgtaatcgaatggaatggaaacggatggaatggaattgaatggaatcgaaaggaatagaatggaatggagtttaatggaaagatatggaatggaatggaatggaatggactcgaatggaatggactggaatggaatggacttgaatggcatagactggagtggaatggactcgaatagaatggaaatgaatttaatggaatggaatggaatgaatagaatggaatggaatcgtatggaatggaatggattgggttggaatcgaatggattagagtcgattagaatgacatcaaatggaaaggaatggaatggaatgggctcgaacggaatggacttgaatggaatagaattgaaaacaatggcatcgaatggaatggaaaggaatacaatggaatggaatggaatcgaccaaaatgtaatggactcgaatggaatggactctaatataatcgactcaaaaggaatggtctcgaatggaatttattcaaatagaatagaatcaaatggaatgtaatagtgtggaatggaagcgaatgaaatggaatcaaatggaatggaacggaatgaaatggactggaatagaatggactcgaatgtaatggattgcaatgtaattgattcaaatggaatggaatcgaaggaatagaatggaatggagactaattgaaagatatcaaatggaatggactggaatggaatagactggaatggtatggactctaatggaatcgactggagtggaatggactccaatggaatggaaactaatggaatggaattaaatggactctaatgaaatagaatcgaatggaatggcattgaatggaatggaatggaccaaaatgtaatggactctaatggaatgtacgcgaatagaatggactcaaaaggattggattcgaatggaaattattctaatagaatggaatcaaatcaactgcaatagtatggaatggaatagaatggaatgaaatcaaatggaatggatcggaatggaatggactggaatagaacagactcgaatgtaatggattgcaatgtaactgactcaaatggaatggaatagaatggaatgtaataaaatggaatggaatacaatggaatggaataagatggaatggaatggaatcgaatggagtcgaatggaatagagtgcaatggaatggaatggactcgaatggaatggcatcgaatggaatggtctggaatgaaatggactcgaatggaatggactggagaggaatagactcaaatggaatggaaacgaatggaatggaatggaatggaatggaatggaatggaatggaatggaatggaatcggatggaatggaatggaatggaatgcaatcgaatggaataggatcgaatggaatgtcatcaaatggactggaaggaaaggaatggactcgaatagaatggattcgaatggaatagaatcgaaagaataggcatggaatggaatggaatggaatggaatggaatggaatggaatggaatggcatggaatggagtggaatgtacccaaatgtattggactcaaatgtaatggacccaaatggaatggactctgaagaaatggtgtcgaatggaacttatttgaatagaatggaatcgaatggaatgcaatagtatggaaaggaatcgaatggaatggaatcgagtggaatggaacggaatggaatggattggaataaaacgcaatagattgtaacggattgcaatgatattgattcgaatggaatggaatctaaaggaatggaatcgaatggaatggaccagaatggaatggactggaatagaacggactcgaatgaaatggtttgcaatgtaattgattcgaatggaatggaattgaatggaatgtattcaaatggaatggaatggaatgcaatggaatggaatagaatggaatgcaatggaatggaaaggattggaattgagtggaatggaatcaaattgaatggaatcgaatggaatggaccagaatggaacggactcgaatggaatggactaggacaaaatggaatggaacggattggaaacgaaaggaacggaatggaatggaatgaacttgaatggaatggagtcaaatggaatggaatcaaatggaatggaattgattggaatagaaataaatagaatggaatggagcgaaaaggaaatgtatggaatggaatggaatggaatggaatggaatggaatggaatggactcgaatggaatagactagaatggaacagactcgaatgaaatggactggagaggaatggacacgaatgaatggaaacgaatggaatggaatggaatggaaaggaatagaatggaatggaattggatggaacggaatgggatggagtggaatggagtcgaatggaatacaatcaaatggaatgacatcgaatggaatggtatggaatggagtggacttgaatggaatggactagaatggaatagaatcaaatgcaatggcatggaatggaatggaatggacccaaatgtagtggactcgaatggaatggacccaaatagaatggactcaaaaggaatggactcgaatggaatttattcgactagaatggaatcgaatggaatgcagtagtatggaatggaatcgaatggaatggaccggaatggaatggacaggaaaagaaaggactcgaatgtaaaagaatgcaatgtaatagattcgaatggaatgaaatcgaatggagcgtaatcaaatggaatggtatggaatgcaatggaatggaataaaatggaatgcaatggaatggaacggagtggaatcgagtggaatggaatggattggaatggaattgaatggaatggattcaaatggaatggactggaatggaatggactcgagtggaatagactagaatggaatggactcgaatggaatagacaggaataaaatggaatagaacggattgtaatcgaatggaatgaaatggaatggaatggataggaatggactcgaatgcaatggagtcgagtacaatggaaccgaatggaatggaatcgaatggaatgcaagtgaatggaatcaaaatgaatagaatggaatggggtggaatagaaacatatcgaatggaatgcaaaggaatggaatggactcgaatggaagggacaggaatggaatggactcgaatggaatggactggagtcaaatggactcgaatggaaagggaacgaatggaatgtaatggaatggaaaggagtagaatggaatggaatcagatggaaaaaatggaatggcatggagtcgattggaattgaatcgaacggaatggcatcgaatggaatgtaatcaaatggaatggaatggactcgaatggaatggactcgagtggaatagaatagaatggaatggcatcgaatggaatcgaatggaatggaatgcaatggacccaaatgcaatggactcgaatgaaatggaatcaaattgaatggactcgaaaggaatggtttcaaacggaaatattcgtatagaatggaatcgaatggaatgcaatattatggaatagaatcgaatgtaatgtaattgaatggaatgtaccggaattgaatggactggaataaaatggactcgaatataatggattacaaagtaattgattcgaatggaatggaatcaaatggaatatattaaaatggaacggaatggaatgcaatggaatggaatagaatgcaatgcaatggaaaggaacgcagtagaatcgagtggaagggaatagaatggaatggaattgaatgcaatcgactggaatggaagggactcgaatggaatggattggaacaaaatggaatcgaaggattggaatcgaacggaacggaatggaatgccctggaatggaatggaatctaaaggaatggaatcagatgaaatggaattgaatggacttgaaaggaatagaatggaatggagtgtaatggaaagatagcaaatgaaatggaatggaaaggaatggactcgagtggaatggactggaatggaatggactcgaatggaatggcctggagtggaatgcactcgaatggaacagacaggagtggaatggactcgaatggaatagaaacaaatggaatggaatggaatgcaaaggaatagaaaggaatggaatcagatttaatgaaatggagtggaatggagtcaaatggaatagaattgaatggaatggcatcaaatggaatggaatggaatggaatggaatggaatggaatggaatggaatggaatggaatggaatggattcgaatggaatggactcgaatggaatagaatctaatggaatggcatcatatggaatggaatggaatggagtggaatggaatggaatggaatggaatagatccaaatgtaaaggacttgaatggaatggactcaagcagaatgaagaagaaagcaatggtctcgaatggaatttattcaaatagaatggaatcaaatggaatgcaatagcatggaatggaatcgaatggaatggaatcaaattggatggaccggaatggagtggactggaatagagcagactcaaatattattgattgcaaagtaattgattggaatggaatggaatcgaatggaatgtattcaaatggaaaggaatggtatgcaatggaatggaatagaatggaatgcaatgtatttgaaaggagtggaatcgagtggactggaattgaatcaaatggaatcaaatggaatggaatcgaatggaatggaattgaatgcaatggaattgtacggaatctaaaggaatagaatggaattgactgtaatggaaagatatagaatgaaacggaatggaatggaatggactcgaatggaatggactggaaatgaatggactcgaatggaatggagtggagtggaatggacccgaatgtaatggaatcgaatggaatgtaaaggaatagaatggaatggaatctgatggaacggatggaatggaatggagtcgaatggaatagagtcaaaaggaaaggcatcaaaggaatggaatggaatggcatcgaatggaatggaaacgagtggacacaaatgtaatggactcgaatggaatggactcaaatagaatggactcgaaaggaatggtaacgaatggaatttattcaaatagaatgtaattgaaaggaattcaatagtatagaatggaatggaatcgaatggaatggaccggaatgaaatggactggaatagaatggactcgaatgtaatcgactgcaaagtgattgttttcaatggaatggaatcaaatggaatggaatcaaaaaggaatggaatggaatgcaatggaatggaatagattgaaatacaaaacaattgaatggagtggaatcgagtggaatggaatagaatggaatggattcgaatgcaatggactggaatggaatggactcgaatggaatggactggaacaaaatggaattgaaatgattggaatcgaatggaaccgaatagaatggaatggaatggaatggacacgaagggaatggagtcaaatggaatggaatcgaatgcattggagtggaatggaatggaattgaatggaatcaaaagaaatagaatagaatgaagtgtaatggaaagatatcgaatggaatggaatgaaatggactcaaatttaatagactcgaatgtaatggaccggagtggaatggactcgaatggaatggaaacgaatggaatggaaaggaatagaatggaatggaattggatggaacggaatggaatggaatggagtcgatataaacagaatctagtggaatgacctcgaatggaatggaatggaattgaatggaatggactcgaatggaatagaatcgaatggtatgacattgaatggaatggaatggaatggaatttaatggacccaaaagtaatggactcgaacggaatggactcaagtagaatggactcgaaaggaatggtctcgaatggaatttattcaaatagaatggattcgtgtggtatgcaatagcatggaatgaaatcaaaaggaatagaaacgactggaatgtataggaagggaatggactagaatacaacagactcgaatgtattggattgcaatgtaattgatatgaaaggaatggaaatgaatggaatgtaatcaaatggaatggaaaggtatggaatggactggaatggaatggactcgcatggaatggactggaacaaaatgtaatcgaacagattggaatcgaatggaacagaatgcaatggaatgcaatggaaggcactggaatggaatggagttgaatggaatggaaccgaatggaatggaaacgaatggaatggaattgaatggaatggaaaggaatagaatggaatggagtacaaaagaaagatattgaatggaatggaatggaatggaatggaatggaatggaatggactcgaatggaatagactggaatggaatggactcgaatggaatggactggagtggaatggactctaatggaacgaaaatgaatggaatggactggaatggaaaggagtagaatggaatagattcggatggaatgaaatggaatggaatggagtcaaatggaatacaaatgaaaggaatggcattgaatggattggaatggaatggaatggaatggaatcgaatggaatggactcaaatggaatattatagaatggaatggcatcgaatagaatggaatgcaatgtaattgaatagaagggaatagacccaaatgtaatggactcgaatggaatggactcaaatacaatggacttgaaaggaatggtctcatatggaatttattctaatagaatggaatcaaatggaatgcaatagtattgaatggaattgaatggaatggaatcaaaaggaattgaccagaattgaatggactggaatagaacagagtcgaatgcagtggattgcaatgtaattgattcgaatggaatggaatcgaatggaatgtaatcaaatggaatggaaaggaatgcaatggaaaggaatagaatggaatgcaatggaatggaacggagtggaatcgagtggaatggaatcgaatggaatggaattgaatggaatggaatcgaatggaatggactggaatggaatgcactcaaatggaatggattggaataaaatggaatcgaacaggttggaatcgaaaggaacgcaatggaatggaatggaatggactcgattggaatgcagtcaaatggaatggaatcaaatggaatggaatcaaatagaacggaattgaaaggaatcgaaagaatagaacaaattttagtgtaatgcaaagatattgaatgtaatggaatggaatggaatggactcgaatggaacagactaaaatggaatggactcgaatggtagggtctggagtagaatggactcgaatggaatggaaacgaatataatggaatggaatgaaatggaaaggaatagaatgaaatgtaatcggatggaatggagtcaaattgaatggacttgaaggaatagaatagaatggaatggcattgaatggattggaatggattggaatggccttgataggaatggtctagaatggaatagaatggaatggaatggactcgcatggaatggacccaaacgtagtggactcgaatggaatggactcaaatagaatggattaaaaagaaatggtatcgaatggaatttattccaatggaatggaatcgaatggaatacaattgtatggaatggaatcgaatacaatggaatcaaatggaatggaccggaatggaatggactggaatagaacagactcgaatgtaatgcatggcaatgtaattaatttgaatggaatcgaatggaatggagtcaattggaatggaatctaaaggaatggaatcgaatgaaatagaattgaacggaatcgaaagtactagaatggaatggagtgtaaaggaaagaaatcgaatggaatggaatggagtggaatggaatggaatggacacgaatggaatggactggaatggaatggacttcaatggaattggctgtagtggaattgactccaatagaatggactggactggaatggactcgtatggaatggaaataagtggtatggaatggaatggaatggaatggaatggaatggaatgcaacggaaaggaatagaatggaatggaatcggatgaaacagattggaatggaatggagtcgaatggaatagaatcgaaaggaatggcatcagacggattggaatggaatggaatggaatggactcgaatggaatggacacgaatggaatagaattgaatggaatgacatcaaatggaatggaatgcaatggaatgggatggaatggaatggaatggaatggaatggaatggaatggaatgtacccaaatgtaatggactcaaatggaatggattcaaatagaacggaatcgaaagaaaaggtctcgaagggaatttaatcgaatagaatggaatcaaatggaatgcaatagtatggaatggaatcgaatgtaatggaatcaaacggaaaagtccagaatggaatggactggaataaaacggactcgaatgtaatggattgcaatctaattgattcgaatggaatggaatccaatggaaaggaccggaatggaatgggatggaatagaacggattcgaatgtaatggattgcaatgtaattgattcgaatggaatggaattgaatggaatgtaagaaaatgaaatatgaatgaatgaaatagaatggaatagaatggaatgcaacggaatggaatagaatgcaactgagtggaatggaatagaatggaactgagtggaatggaatcaaatgcaatggtctgcaatgcaatggactccaatggaatggactggaacaaaatggaatggaacggattggaatcgaaaggaacggaatggaatggaatggaatggactcgaatggaatggagtcgaatgtaacggaatcgaatggaattgaatcaaatggtttggaattgattggaatcgaaaggaatataatggaagggagtgttatggaaagataacaaatggaatggaatggaatggactcgaatggaatggaatggaaagcaaaggactcaaatggaatggactggagtagaatggacccgaatgaatggaaacgaatggaatggaatggaaaggaatagaatggaatggaatcagatggaatgtaatggaatagaatgaaacggaatggcgttgaatggaatagaatcgaatggaatggcatcgagtggaatggaatggaatggaatggaaaggagtggactcgaatggaatgtattcgtattgcttggcatcgaatggaagggaatggaatggaatagaatagaatagaatagaatagaatggaatggaatggagtggaatctagtggaatacaatcaaacggaacggaattgaatgcaacggaatcgaatggaatggagacgcatggaattgactggaacaaaacggaatcgaacggattggaatcaaactgaacggaaaggaatggaacggaatggaaaggtctcgaatgcaatggattcgtactgaatggaatccaatggaatggactggaatggaatggactcgaatggaatgaactggaacaaaatgtaattgaacggattggaatcgaacagagcagaatagaatggaatggaatggcatggactcgaatggaatggggtcaaatagaatggaatcgaatggaatggagtcgaatggaatggagtcaaatagaatgtaatcaaatggaatggactcgaatggaatagatttgaatgcaatggaattgaatcaaatggaatgaaatggcatggaatggaatggacaaaaatgtaatggactggaacggaatggactcaaatagaatggacttgaaaggaatgttctcgaatggaatttattcgaatagaatcaaatcatatggaatgcaatagtatggaatggaatagaatggaatagaattgaatggaatggacaggaatggaatggactggaatagaatggactcgagtgtaatggattgcaaagtgatttgaatggaatggaaacgaatggaatgtaatcaaatggaatctaatggtatccaatgaaatggaattgaaaggaatgcaatggaatggaacggagtggaatcgagtggaatggaaacgaatggaatggaatcgaatggaatggaatcgactggaatggactggaatggaatggaatcaaatggaatgcagtcgaatggaatggaatcaaaatgaatgtagtcgaatggaaaggaatcgaatggaatggaattgaatagaatcgaaaggaatagaatggaatggagtgtcatggaaagatatcgaatggactggaaaggaatggactcgaatggaatggactggaatggaatggactagagtggaatagactggagtggaatggattcgaatggaatggaaacgaatggaatggaatggaaaggaataaaatggaatggaaacggatggaatggaatggaatggattggagttgaatggaatagaatcgaatggagtggcatcgaagagattggaatggaatggaattgaatggaatggactcgaatggaatagaatagaagggaatggcatcaaattgaatagaatggaatggaatggattggacccaaaagtaatggactcgaatggaatggactcaaatagaatggactcaaaagtaatggtctcgaatgtaatttattcaagtagaatggaatcaaatggaatctaaaagtatggaatggaatcgaatggaatggaatcgaatggcatggaccggaattgaatggactggaatagaacggactcaaatataatggattgtaatgtaattgattcgaatgcaatggaatcgaatggaatgtaatccaatggaatggaatggaaagaaatgaaatagaatagaatggaatgcaatggaatggaatggagtggaatcgagtggaatggaatcgaatggaatagaatcgaatagaatggaatggagtaaatagggctgcaatggaatggactcgaatggattagactggaagaaaatggaatcgggtagattggaatcgaacggaacggaatggaatggaattgattagaatggagtggaatggaatggaatagaatggaatggaattgaatagaacggaattgaatggaatcaaaaggaatagaatgaattggagggtaatggtaagatatcgaatggaatggaatggaatgcaatggaatgcaatggaatggactcgaatagaatggactggaatggaatggactcgaatggaatagaatggagtggaatggactcaaatggtatgaaacgaatgtaatggaatgcaacggaatggaaaggaatagaattgaatggaatcggatggaatggaatggaaagaaatgaagtcaaatggaatagaatagaatggaatggcatcgaatagactggaatggaatggagtggaatggaatggactcgaattgaatggattcaaatagaataaaatagaatggattgacattgaattgaatagaatggaatggattggactccaatggaatggactggaatggaatggactcgaatggaatagactggaagaaaatggaatcgaacggattggaatcaaatggaacggaatggaatggaatggaatggaatgcactcaaatggaatagggtctattggaaaggaatcgaatggaatggaatagaatggaatggaattgaatggagtcgaaaggaatagaatctaatggagtgtaatggaaagatatctaatggaatagagtcgaatggaatggactggaatggaatgcacttgaatggaatggactgaattggaatatactcgaatggaatggaaacgaatggaatgaaatggaatggaaaggaatagaaaggaatggaatcagaaggaacagaatggactggaaaggagtcgaatggaatagaatcgaatggaatgacattgaatgcaatcgaatggaatcgaatggaatggacacgaatggaatagaatagaatggaatggcatcgaattgaatggaatggaacggaatggaatggaattcaatggacccaaatgtaatggacttgaatggaatggactcaaatagaatggacccgaaaggaatggtctcaaatggcatttattagaatagaatggaatcgaatggaatgcaatagtatggaatggaattgaatggaatagaatcgaatggaatggaaaggaatggaatgtactggaatagaatggactcgaatgaaaaggattacaatgtatttgatttgaatggaatggaaagtaatcaagtggaaggtaatggtatgcaacggaatggaatagaatggtatgaaatggaatggaatgctgtcgaattgagggaatggaactgaatggaatggaattgaatggaatggactggaatggaattgactcgaatggaatggactcgaatggaatggactgaaacaaagtggaatcgaatggattggaatcgaacggaatggaatggaatggaatagaatggactcgaaaggaatggagtcaaaaggaatggaatcgaacagaattgaatcgaatgaaatggaattcaatggcatcgaaaggaatagaatggaatggagtgcaaaggaatgctatggaatggaatggactcgaatggaattgactcaaatggaattgactggagtggaatggactcgaatagaatggactgtagtggaatgggctcgaatggaatggaaagaatggaatggaaagaatacaatggaaggaaatcggatggaacggaatggagtggaatgaagtcgaatggaatagaatcgaatggaatggcatcaaatggaatggaatggaatggattcaaatggattggactcaaatgaaatagaatcgaatggaatggaatcaaatgtaatggaatgaaatggaattcatccaaatgtaatggtctcgaatggaattgacacaaatagaatggacaagaaacgaatggtctcgaatggaatttattcgaatagaatggaatcgcatggaatgcaatagtatggaatggaattgaaaggaattgaatagaatgcaatggaccggaatgcaatgcaatggaatagaatggactcaaatataatggattgcaaagtaattgattcgaatgcaatggaatcgagtggaaggtactcaaatggaaaggaatggtatacaatggaatggaatagaatggaatgcaatggaatggaatggagtggaatcgagtggaatggaattgaatagaatggaatcgaatggaatggaattgaatggaatggaatcgaatgcaatggaattgaatggtaactaaaaaaatagaatggaatagagtgtaatggaaagatatcaaatgaaatgcaatggactcgaatggaatggacaggaaaggaatggactcaaatgaaatggactagagaggaatggactcaaatgtaatggaaacgaatggaatggaatggaatgaaacggaaaggaagagaatggaatggaatctgttggaatggaatggaatggagtcgaaaggaatagagtcgaatggaatggcatcaaagggaaaggaatggaatggaatggactcgagtagaatggactcaaatggaatagaattgaatggaatggcatcgaatggaatggaatgaaatggaaccaaatgtaatggactcgaatggaatggactcaaatagaatggactctaaaggaatgctctcgaatggaatttattgaaatagaatggaatcgaatggaatgcaatagtatggaatgcaatcgaatggaatggaatcaaatggaatggactggaatggaatggactggaatagaacagactcgaaaataatggattgcaaagtaattgattcgaatggaatggaatcgaatggaatgtaatcaaaaggaatggaatgcaatgcaatggaatggaatagtatgaaatgcaaaggaatggaacagagtggaatagagtggaatggaatagaatggaatggaattgaatggaatggactggaatggaatggactcgaatggaatggactggaacaaaacggaatcgaacggattggaatcaaatggaacggaatagaatggaatggaatggaatggactcgaattgaatggagtcgaatgaaaaggaatcaaatggaatggaggcgaattgaatggaattgaagggaatcgaaaggaaaagaatgcaatggagtgtaatggaaagatatcacatggaatggaattgaatggacacgaatggaacggactcgaatggaatggaccggagtggaatggactcgaatggaatggaaaagaatggaatggaatggaaaggaacagaatggaatggaatcggttggaatggaatgcaatggaatggagtcgattggaatagaatcgaatggaatggcattgaatggaatcaaatggaatcgaatggaatggaatcggttggaacggaatgcaatggaatgtagtcgattggaatagaattgaatggaatggaattggttggaatggagtgcaatggaatggagtcgattggaatagaatcgaatggaatggcatcgaatggaatcaaatggaatcgaatggaatgactcgaatggaatagaatagaatggaatggcatagaatggaatggaatggaatggaatggaatggaatggaatggacccaaatgtaaaggactctaacggaaaggagtcaaatataatggactcgaactgaatggtcttgaatggaatttattcgaacagaatggaactgtgtggaatgcaatagtatggaatggaatcgaatggaacagaatagaatggaaaggactggaatagaatgcactcgaatgtaatggattgcaatgtaattgatttgaatggaatggaaatgaaaggaatgtaatcaaatggaagggaaaggtatgcaatggaatggaacggagtggaatcgagtgtaatggaatcgaatggaatggaattgaatggaacggaatcgaatggaatggactggaatggaatggactcgaagggaatggaaaggaacaaaatgtaattgaacagattggaatcgaacgtaacagaaaggaatgggatgaaatggaatggactcgaaaggaatggagtcgaatggaatggaaccaaatggaatggaattgaatggaattgaaaggaatataatggaatggagtgtaatggaaatatatgaaatggaatggactcaaatggaatcaactggaatggaatggactcgaatggaatggagtggagtggaatggactcgaatataatggaaacgaaaggaaaggaatggaatggaaaggaatagaatggaatggaatcggttagaacggaatggaatcaaatgaagtcgaacaaaatagagtcgaacggaatggcatcgaatggattggaatggaatggaatggaatggattctaatggaatggactcgaatggaatagaaaagaatggaatggcattgaatggaatggaatggaatggaatggaatggaatggaatggaatggaatggaatgaactggacccaaatgtaatggactcgaatggaatgaactcaaatagaatggactcaaaacgaaaggtctcgaatggaatttattcaaatagaatggaaacaaaaggaatgcagtagtatggaatggaatcgaacgtgatggaatcgaatgaaatggactggaatggaatggactggaatagaacggactcgaatgtaatggatgacaatgtaattgattcgaatggaatggaatcgaatggaatctaaacaaaaggtatggaatggaatgcattggaatggatagaatctaacgcaatggaattgaatggagtggaatcgagtggaatggaattgaaaggaatggaatcgaatggaatggaatcgaatggagtggaatggaatggaatggaatagatacgaatggaatggactggaacaaaatggaatcaaacagattggaatcaaacggaacagaatggaatggaacagaatggaatggaatggaatggactcgattggaatggagtcgaatggaatggaatcgaaggaaatggaatcaaataaaacggaattgaatggaatcaaaacatagaatgaattggagtgtaatggaaagacatcgaaaagaatggaagggaatggactcgaatggaatggactggaatggaatggactcgaatggaattgactggagtggaatggactcaaatggaatgcaaacaaataattggaatagaatggaaattaatacaatggaatggaatcggatggaatggaatggagtcaaatagaagagaatcgaatggaatgacgttgaatggaatggaatggaatggaatcaaatggaatagactagaatggaattgaatagaatgcaatgacatcgaatggattggaatgcaatgcaacagactccaatggaatgatccagaatggaatagaatgtaatggaattgaatggcatggaacgaactcaaatgtaatggactcgagtggaatggactcaaatagaatgcactcaaaagcaactttctcgaaagtaatttagtagaatagaatggaatcgtatggaatgcaatagtatggagtggaatagaatggaatagaatcgaatggaatggacaggaatggaatggactggaatagaacggactcgaatgtaatggattgaaatgtaattgatttgaatggaatggaattgaatggaatataaacacatagaatggaatggtatgcaatggaatggaatagaaaggaatgcaatggaatggaacggagtggaatcgagtggaatggaatcgaatggaatgtaatcaaatggaatggactggaatggaatggagtcgaatggaatggactggaacaaaatgtaatcgaacggatttgaatcgaacagaacggaatggaatggaatggaatagactcaaatggaatggagtcgaatggaatggaaccaaatggaatgtaatcgaatggaatggaattgaatggaatcgaaagtaatataatggaaaggagattaatggaaacatatacaatggaatggaaaggaaaggaatgtactcgaatggaatggactggaatggaatggactcgagtggaacggagtggagtggaatgtactcgaatggaatggaaacgaatggaatggaatggaatggaatggacacgaatggaataaaatcgaatggaatggcatcgaattgaatggaattgaacacaatggaatggaatggaatggaatggaatggaatggaatggaatggaatggacccaaaggtaagggactcgaatggaatggactcagatagaatggactcgaaagcaatggtctcgaatgcagtttattcgaatagaatggaatcaaatggaatgcaatagtgtggaatggaaatgaaaggaatagaatagcatggaatggataggaatgcaacgtactgtaatagaacggactctaacgtaatggattgcaatgaatttgatttgaatggactggaacagaatgaaatgtaatcaaatggaatggaatggtatgcaatggaatggaatagaatggaatgaaatggcatggaacgcagtggaattgagtggaatggtattgaatggaatggaatcgaatggaatggactggaatggaatgactcgaatggaatggattggaaaaaatggaatcgaacagattggaatcgaatggaacgtaatggaatggaatggaatggaatcaaatcgaatggaatggagtcgaatgaattggaattgaatggaatggaatcgaatgaattggaattgaatggaatcgaaaggaatagaatggaatggagagcagtggaaagatatcgaatggaatagaatggagtcaaatggaatggactagaatggaatggactcgaatggagcggactggagtggaatggactcgaatggaatggaaacaaatggaatggaatggaatggaatggaatgcaatggaatggaatgcaatggaatgcaaataaatagaatggaatggaaacggatggaatggaatggagtggaatagagtcgaatggaatagaatcgaatggaatggcatcaaatggaatggaatggaatggaatggaatggatttgaatggaatagaatcgaatggaatggaattgaatggaatgaaatggaatggaatgaaatggaattgacccaaatgtaatggacttgaatggaatggactcaaatagaatggataagaagggaacggtctcgaatggaatttatgcgaatagaatagaattccatggaatgcaaaagtacataatgcaatcgaatggaatggaccggattggaatggactggaatagaaaggactcgaatataatggattgcaaagtaataatttcgaatggattggaatcaaatggaatgtaatcaaatgcaatggaatggtatagaattgagtgcaatggaatggaatggagtggaatcgagtggaatggaaatgaatggaatggaattgaatggtatggactggaatgcaatggacatgaatggaatggactggaacacaatggaatcgaacgtaatggaatcgaatgaaaaagaatagaatttaatggaatggaatggactcaaatagaatggagtagattggaatggaaacgaatggaatggaataaaaaggaatggaatcaaaaggcatagaatggaatggagtgtaatggaaagatatccaatggaatggaatggaatggactggaatggaatagactcaaatggaatggactggagtggaatggacccgaatggattggaatggaatggaatggtatggaatggaaaggaatagaatggaatggaatcggatggaacggaatggaatgaaatggagtcgaatgtaatagaatcaaatggaatggcatcaaatggcatggaatggaatggattcgaatggaatggacttgaaaggaatagaatcaaatggaatggcttcgagtggtatggaatggaatggacccaaatgtaatggacgtgaatggaatggactcaaatagaatggactctaaaggaatggtatcgaattgaatttattcgagtagaatggaatcgaatggattgcaatattatggtatggaatcaaacggaatggaatcgaatggaatgtaccggaatggaatggactggaatagaacggactcgaaagtaatggattgcaatgtaattgattcgaatggaatgtaatcaaacggaatgtaatcaaatggaatggaatggaatggaatagaatggaatgcaatggaatggaacagaacagagtggaattgacaggaatggaatcgagtggaaaggaacagaatggaatggaatggagtcaaatggaatagaatcaaatggagtggcattaaatggaattgaatggaatggaatggactctaatggaatggacacgaatggaatacaatggaatgaaatggcatcgaatggaatggaatggaccctaacgtaatggagtcgaataaaagggactcaaatagaatggattcgaaaggaatggtctcgaatgaaatttattcgaatagattggtattgaatggaattcaatagtatggaatggtctcaaatgaaatttattcgaatagattggtattgaatggaattcaatagaatggaatggtattgaatggattggaattgaatggaatggaccggaatggaatggagtggaatagaacgtactccaatgtaatggattgcaatgtaattgattcgaatggaatggaatcgaatggaatgtaatcaaatggaatggaatggaatgcaatggaatggaatggaatagaatgcaatgtaatggaatagaacggaatgcaatggaatggaacagagtggaatcgagtggaaaggaattgaatggaatggaatcgaatggaatggactcaaatggaatggactcgaatggaatggactctaatggaatggtctcgaatggaatttattcgaatagaatggaatcgagtggaatgcaatagtacagaacggaattgattggaatggaatcgaatggaatgtagcgggatggaatggactggacaaaatggaattgaatggcacggaatggaattgaatggactggaatggaatggagtcgaacggaatggaatcggatgtaatggaaacgagcagaatggaattgaatggaatcaaaaggaatagaatggaatggagtgtaacggaaggaaatcaaatggaacggaatggaatggactcgaatggaatggactggaacaaaatggaatcaaatggattggaatcgaatggaaccgagtggaaaggagtggattggaatggaatggaatggaatggaatggagtcgaatggaatggaatcgaatggaaaggaagagaatgtaatggaatcaaatggaatggaattgaaaggaatcaaaaggaatacaatggaatgaactgtaatggaaatatatcgaatggaaagtaacagaatggaatggacacgaatggattggactggaatggaatggaatgaacttgaatggaatggactggagtggaatggtcttgaatggaatagaatctaatggaatggcatcaaatggaatggaatggaagggaatggaatggacacaaatataatggactcgaatggaatggactcaaactgaatggacacaaaagtaatggtctcgaatggaatttattcgaatgcaatggattcgaaaggaatgcaatagtatggaatggaaacaaatggaatggaatcgaatggaatgtaggggattggaatggactggaatacaatggacttaaatgtataggattgcaatgaaattgactcgaatggaatggaatcaaatggaatgtaatcaaatggaatggaatggaatgcaatggaatggaatacaatggaatgcaatggaatggaatgcagtggaatcgagtggaatgaaatcgaatggaatagaattgaatggaatggactgcaatggaatgtactcgaatggaatggacaaggaacaaaatggaattgaacagtttttaatcgaacggaatggaaaggaatggaatggaaaggactcgaatagaatggagttgaacagaatggaccagaatggaatggactggaatagaacggactcgaatgtaatggactgcaaagtaattgattcgaacggaagggaatcgaatggaatgtaatcaaatggaatggaatggaatgcattgcaatggaatagaatggaatgcaatggaatggaagggagaggaatcaactggaatggaattgaatggaatggaattgaatggaattgaatcgaatggaatggacagaatggaatggattcgaatggaatggactggaacaaaatggaaaagaacggattggattcaaaaggaattgaatttaatggaatggattgtattcaaaaggaatggattctaatggagtggaattgaaaggaatcgaaaggaatagaatggaatggagtgtaagggaaagatatcgaatggaatggagtggactccaatggaatggaatggagtgtaatggaaagatattgaatggaatgaaatggaagggagtggactcaaatggaatggaatggactcgaacggaatggactggagtggaatggactagaatgtaacggaaacgaatggaatggaatggaatggaatgaaaaggaaacgaatggaattgaaaggaatgaaatggaaaggaatagaatggaatggaatcagatggagtcgaatggaatagaatcgaatggtatggcatcaaatggaatggaatggattgtaatggaatgaactcgagtggaatggaatcgaatggattagaatcgaatggaagggaattcaatggaatggaatggaatggacccaatagtaatggacttcaaaggaatggactcataaagaatggactcgaaagaagtggtatcaaatggaatttatttgaaaagaatggaatcgaatggaaagcaatagtatggaatggaatcgaatgtaatggactggaatggaatggtctggaataaaacggactcgaatgtaatggattgcaatgtaattgatttgaaaggaaaggaatcgaatggaatgtattcaaaaggaatggaatggaatgcagtagaatgcaacagaatggaatgcaaaggaatggaatggagtgaaatcgagtggaatggaatcgaatggaatggaattgaatggaatggaatcgaatggaatagactcgaatggaatggaattgaatggaatggaatcgaatggaatagactcgaatggaatggactggaacaaaatggaagggaaccgattggaatcgaaaagaatggaatcgcatggaatggaatggaaaggatttgaatggaatggagacgaatggaatggaaccgaatggattggaatctaatggaatggaattgaaaggaatcgaaacgaatagaatggaatggagtgtaatggaaagatatcgaatggaatggaattgaaatgaattgaaaggaatagaatagaatggagtgtaatggaaacatatcaaatggaatggagtgcaatggactcgaatgcaatggaatgcaatggaatggattggaatggactcaaatgaaatggactggagaggaatggacaagaatggaaaggaaaagaatggaatggaatggaaaagaatggaatggaatggagtggaaaggaatagaatggaatggaattggatggaatgcaatggaatggaatgtagtcgaatggaaaacattcgaatggaatggcatcaaatggattagaatagaatggaatggaatggaatggactccaatggaatggactcgaatggaatataatcaaatggaatggcatcgaatggaatggaatggaatggaatggaccaaaagtaatggaatcgaatggaatgggctcaaatagaatggactcaaaaggaatggtctcgaatggaatttatttgaatagaatgtaatcgaatgtaatgcaatagtatggaatggattcgaaaggaaaggaattgaatggaatgaaccggaatggaatggactggaatagaacagactcaaatgtaatggattgtaaggtaattgattcgaatcgaatggaatcgaatggaatgtaatcaagtggaatggaatggaatacaatggaatggaatagaatggaatgcaatggaatggaacgtagtggtatcgagcagaatggaatcgaatggaatggaacggaatggaatggactacaatggaaaggactggaattcagtggactggaacaaaatggaatcgaacggattggaattgaatgaaacggaatagaatggaatgcaacggacacgaatggaatggagtcgaatggaatggaaccgaatggaatggaatcgaagggaatggaatcaaatggaagggaatataatggaatcgaaaggaatagaatgcaagagagtgtagtggagagatatcaaatggaatagaacagaatggaatggactcaaaaggaattgactggaatggaatggactcgaatggaatggacttgcgtggaatgcattcgaatggaatggactgaagtggaatggattcgaatggaatggaaacaaatgcaatggaatgaactggataggaatggaatggaatggaaagaatagaatggaatggaatcggttagaatggaatgcaacggaatggacttgaatggaatagaatagaagggaatggcatcgaattgaatagaatggaatggaatggattggacacaaaagtagtggactcgaatggaatggacttgaaaggaatggtctcgaatggaatttattcaaataggatggaatcgaatggaatgcaatagtatggaatggagtcgaatggaatggaatcgaatggaatgtagtgggatggaatagactggaacaaaatgaaatcgaaaggattggaaccgaatggaatggaatggaatggaatggaatggaatgaactcgaatacgatggagtcaaatgggatggaatcgaatggaatggaattgaatggaatcgaaaggaatagaatggaatggagtgtaacggaaagatatcaaatggaatggaatggaatggactcgaatggaatggactggaacaaaatgaaatcaaaaggattggaatcgcagggacccgaatggaaaggaatggattggaatggactcgaatggaatggagtcgaatggaatggaatcaaatggaatggaatcgaatggaatggaattgaatggaatcaaaaggaatagagtggaatggagtgtaatgtaaagatatcgaatggaatggaatggaatggactcgaatggaatggactggaagggaattcactcgaatgcaatggacttgagtggaatggactcaaatggaatggaaacgaatggaatggaatggaaaggaatagaatggaatggaatcagatg

SEQ ID NO: 2363 - DNA, 800 bp, Homo sapiens
  misc_feature (1)..(800): DMR17:27429401
tgacatccaaggcccctcccacctgagttctgactgggggccatatcccaggcccaatagccctgggatgagggtgtgtggcaggaagcccccagcgaggctgaaccctgggggcagttccagaagccacctgccatgcccaggcagcttccccacaccaggcggcacacaacccttcctctgggatcagcagactataggcatgtcatcagtgtcagaccacaggggccacacagagaccctgaggactccagagacccaggcaggtggggcccagcccagaaaggcctgcatgggctcactggagacactgaccacgtctgttttcctttcagcaaaacccgagaaagggtcctcaggacccaggtctgtgctggcatcacatggcgggaagaccctctgcaagggggacaggaaggcccttcccggcccaccagcccggttccagcggcccatttggtccgcttctccacctcgtcctacaccctgtcctggtggggctgtccatgaggccaaggcccaggaacatgtgggggcttctggggagcccagggcagcagaccactctctgggggcacctgggactcagggcatgcccagcctggccccggctcagggaggacctcggcgttcctggagattcctgcagtggaactctatgctccagctcccgacggacctggatgtggggggcccttggttcccccatgacgatttcaaacagagctgctgggtccatgtcccttctaaatgtgtcctggacagccccgggaccatgggacaggcctagcccagggagc

SEQ ID NO: 2364 - DNA, 1100 bp, Homo sapiens
  misc_feature (1)..(1100): DMR17:28067601
attcaatatataaaaaaactggcattagggatagatttgggcagttagcatggagatagttcataagatctggtcaaacatgatgcaactatcctgtgatggtgacttttgggatcttagatgttagagattgagactttggggattttgctcttttgggatttcaacactgaggattatggcgttcaaaattgtgtctcggtattgtgatccaaactgtaggtagaccttcttaaaatatatatatatatatatatggtctgggcatggtggctcacacctataatcccagcactttgggaggccatggcaggtgaatcacctgaggtcaagagtttgagaccagcctggccaacatggtgaaaccccacctctactaaaaatacaaaaattagcagggcatggtggtgcacgcctgtaatcccagctactcaggaggctgaggtaggagaattgcttgaagccgagaggtggaggttgcagtaagccgagagggagccaccacactccagcctgggccacagagcgagactccgtctcaaaaaaaaaaaaaaaaaaatatggatgttcgattgttccaataccatttgttgaaaagtttgtcctttctccattgatttgcctttatacttttctcataaaattaattggccatagttgtgtgtctcatttcttctttaacctatagattgcttagaagtgtgtttttaattttctttttttctttttagtcaagtgcagtagtcagaagggggaaagagtaaaataaggagttgtatttggaactgactgaacaatcaagggaacttaatatcttcagatgatcctgtttttaattttcaaaaatgatatttgtttttaggttactatcttgtgatataattttgttgtgattagaatatgtggtttgcgtgattgataccattttgggggggaatttgttgagatttaccttgtggccttgtatgtgatcactatttataaatatccttttgtttttaaaacgtatatttattctgcagttgattaatgttttgtatatgtccactaaagtttgctaattgtattttaatttttaaaattttttctattttttagag

SEQ ID NO: 2365 - DNA, 200 bp, Homo sapiens
  misc_feature (1)..(200): DMR17:29249901
ccttggcctgtccattggtctagatattatccctggcagaccatttctatcataaaccaatcctccctccacctcatccctactctgggcaaatgaacaccaaccagtggcattaattcaaaccccttcctgccctgtctacactggaagagacctcatcaggcatcccaggctacagctggtaacagaaagcacagagt

SEQ ID NO: 2366 - DNA, 4000 bp, Homo sapiens
  misc_feature (1)..(4000): DMR17:30857701
aaattaattcttcataagctttatatttagtgactaaagctattttttttttttttttgagttggagtctcaccctgttgcccaggctggagtacagtggcacgatctcggctcactgcaacctctgcctcccgggttcaagcgatcctcctgcctcagctccccctagtagctggaattacaggcacacgccaccatgcccagcaaatttttgtatttttagtagacacggggttttgccatgttggctaggctggtctcaaactcctaacttcagatgatccacctgtctcttggcctcccaaagtgctgggaatataggcgtgagccaccacgcccggcctaaagctaatcttacgttgatactgatttatgatggacagaaagtggttggtagtattgtaattaacatgaatagatgatgttggtctgttattgtgcattttattctttattgcagttcatgaggacaaggaaggaatttactgaagaagtaagaaatcttttgcttgaggaaattaggtggtcaaatcctgaattttcattgaaaaaatattttcccttactcctaaaaaaacaaattgagcaccaagtactttcttccgagtgtcatagtaaacaaggttagtgataattattatcatttatgttaacataccagttttgggtttttatattatttattattttatttttatttctgagacggagttttgctcttgtcgccctggctggagtgcagtggcacaaacctggctcactgcaacctctgcttcctgggttcaagtgattctcctgcctcagcctcctgagtagctgggattacaggcacccaccatgacgccctgctaatttttgtatttttagtagagatggggtttcaccatgttggccaggctcgtcttgaactcttgatctcaggtgatccatctacctcagccccccaaaatgctgggattacaggcatgagccactgcgcttggcctattttttctttttttttagagtgttgctctgtcacccaggctggaatgcagtggtgcaactttgcctcactgcaaccttcgcctcccgggctcaagtgattcctgtgtctcagcctcctgagtagctgggaccacaggcttgcgccactgcacctagcttattttattttttaatttttacttattctcttgagactgggttatgagactggctagtttttgtatttttggtagagaccaggtcttgccatgttgcccaggctggtcttgaactcctgggctcaagtgatcctttcgccttagcttcccaaagtgctgggattacaggcatgagtcaccacgcccagcctaacgtgtcagttttgaaaaacactaagacttaaccaatgacacttggaagtgttcaccacagacaacattgcttacacttggcagggagaattgttcagctgaagtaaaagtatcttgtacaatgcaatgtgcaacattaatccccgccagtttccaaaaatgccaactcaaagatagctttaattatgttaaaatattatgtacttaaggaatgccttagataattttagcttatatagcttgtataaaagacagtctaagtattaaaatctccagcttgctttcagtatgttatatttgattcttgcctttttattttattttattttatttattttttgagacagagtcttgctctgacacccaggctgaagtgcagtggcgcgatctcagctcagtgcaacctctgcctcccagatttgagtgattctggtgtctcagcctgcctagtagctgagattgcaggcacctgccaccatgcctttctaatttttgtattttttagtagagatggggtttcaccatgttggtcaggctggtctcgacctcctgacctcaagtgattcactcgcctcagcctcccaaattgctgggattataggcatgagccaccatacctggcctatttatttattttttaagagacacggtctcactttgttgcccaggctagaatacagtttgtttgtttgtttatttatttttattttttgagacggcgtcttgctctgccgcccaggcagtggtgtgatctcggctcactgcagcctcagccttctaggttccaccgattctcctgcttctgcctcctaggtagctgagattacaggcacacgccaccatgcctggctaatttttgtatttttagtagagatggggtttcaacatgttggccaggctggtcttgaactcctgacctcaggtgatccacccaccttggcctcccaaagtgctgggattacaggtgtgagccaccgcgcctggcctatttatttattttttaagagacagggtctcactttgtcgcccaggctagagtacagtggtgttttcatggctccctgcagcctcgatctcccgggttcatgtgatcctcccacctcagcctcccaagtagctgggactacaggtgcatgccaccacccctggctgatttttgtatctttagtagagatggagtttccccatgttaccgaggctggtcttaaacgcgtagactcaagcaatccgctcacctcaacctcccaaagttctgggattagaggcctgagccactgcacctggattgcctttgcattttaaagttacaagactattggatacttggaagtgatattaatattactggtttttgttgattagtaagcacatgcacttctttaattcccaaagcagaactggaggctgatgtcagccataaagaaaccaaaaggaaactcgtagaagcagaaaattctaagtcaaaaagaaagaaaccaaatgagtattcaaaaaatctggagaagaccaataggaagtcagaagaacttagcaaaagaaacaactcttctgggataaagctagattcttccaaaggtatattttctaaaacatcccaaaagaaatagattgctttgaggacatgcaaagtggaaaccaaagcagtagaagattttgatatgctttttaaaaaattttaattcaattgtattttaattttagattttctttttcttttttgagacacagtttctctcttgtcacccaggctggagtgcaatggcacgatcttcgctcactgcaacgtccctccacctcctgggttcaggtgattctcctgcttcagcctcccgggtagctgggattacaggcacccacctgcacgcccagataatttttttttttttttgagatggagtcttgcacggtcgcccgggctggagcccaccatcatgcccagctaactttttgtatttttagtagagacggaattggccaggctggtctcgaactcctgaccgcattattcacccacctcggcctcccaaagtgctgggattacaggtgtgagccaccgtgcctggccacgcccaggtaatttttatatttttagtagagacagagttttaccatgttggccaggctggtctcaaactcctgacctcaggtgatccaccccccacccccctccccgcccttggcctcccaaagtgcagattttgatattctaatagatgatgacagtctgcaccagaaatattaacatcttccattcctggtaaattcgagtttttccttctagtcctagaactctttttgttttttaacttttcattctttctccttctctctcttttttttttcttttgctcattgcaactttcaaacaataaatatgtgtttgaaataaatagaacctcacggattatgggcttacaaatgaccatattaacagataggtgttcagtctttgatttttctgtgcttccataaatacatgtgcttttatttttttattttttattttttgagacagcatctctctccgtcgcttgcctgatctcagctcactgcaacctctgcctcccgggttcaagtgattctcctgcctcagcctcctcagtagctgggactacaggcgcacgccaccacgcccagctaaattttgtattttcagtagagac

SEQ ID NO: 2367 - DNA, 1100 bp, Homo sapiens
  misc_feature (1)..(1100): DMR17:30884301
atgagccatcgcgccaggctgtgactggcttatttcacttagcataacatcctcaaggttcatctaagtcgtagtatgtatatagcttacagtgttttacttgcattatatttcttttcttttcttttttttttttttttttttttgagatgtagtcttgctctgtcacctgggctggagtgcagtggcacgatctcagctcactgcaacctctgcctcccggtttcaagcaattctcttgcctcagcctcccgagtagctgggactacaggcacgtgccaccatgccctgctaatttttgtatttttagtagatatggggtttcaccatgttggccaggcttgtctcgaactcctgacctcaagtgatctgcccgcctcggcctcccaaaatgctgggattacagacgtgagccaccgcacctgcccctttccttatatttctttttcttttttttttttttttgagacagagtcttgctgtgtcgcccaggctggagtgcagtggtgcaatctcggctcactgcaagctccgcctcctgggttcacgccattctcctgcctcagcctcccgagtagctgggactacaggcgcccaccaccacgcctggctaattttttgtatttttagtagagacggggtttcactgtgttagccaggatggtctggatctcctgaccttgtgatccacccgcctttgcctcccagagtgctgggattacaggcgtgagccaccgtgcccagctgcctttgccttatatttctaatggacagtactgctgtagattctagatgttcttttcctttgtcgttgctaaattctcttattagttatagtagttattttgttggtttcttaggtttttctttgctttttttctattttttaaatttttattagaaacagggtctctctgtcacctaggttggagggcagtggtgtgatcataactcactgtaacttcaaactcctagcttcaggtgatcccccaaccttggcctcccaaagtgctgggattacaagcatgagccaccacaactgtcagtttcttaggtttttctgtgtactcaatcatgttatctgcgaacagagatagttt

SEQ ID NO: 2368 - DNA, 2800 bp, Homo sapiens
  misc_feature (1)..(2800): DMR17:31771501
aaatagaccaatcagcgctctgtaaaatggaccaatcagcaggatgtgggtggggccaaataagggaataaaagctggccacctgagccagcagcagcaagccgctcaggtccccttccacactgtggaagctttgttctttccttcttcacaataaatcttgctgctgctcactctttgagtccgtactacctttatgagctgtaaaactcactgcaaaggcctgcagcttcactcctgaagtcagcaagaccacgaacccaccgggaggaacaaacaactccagatacgccacctttaagagctgtaacactcactgcgaaggtctgcggcttcactcctgaagtcagcgagaccacaaacccatcagaaggaagaaacaactctggacatgccacccttaatagctgtaacactcactgcaaaggtctgcaccttcactcctgaagtcaagcaagaccacgaacccaccagaaggaagaaactccagacccatctgaacatctgaaagaacaaactccagacacaccatctttaagaactgtaacactcaccgcgagggtccatggcttcattcttgaagtcagcgagaccaataacccaccggaagcaaccaattctggacacatcagctcgctgcaacctctgcctcctgggttcaagcaattgtcctgccacagcctcctgagtagctgggattacaggtgtgcaccaccacacccagctaatttttgtatttttagtaaagacggactttcgccatgttggccaggctggtcttgaactccagacctcaggtgatctgcccgcctaggcctcccaaagtgctgggattacaggcatgagccactgcgcctggcctaagcaatgtttttttaaaaaacattcacacactaattccaagaaggttttttacaacagttcaggaatgtagtgcattacaaatagaaacttgtttttaacacagaagtggaatgcggttgatacttggctgtattaatatttgtgttacccaaaaaagtactggatgcaaactatatatataaatctgagatctaatgtggatgcttaaaaacgaacttttaaaagttcttttaaaccaaaattttaaaagtaagtccatttttataaaaattaatctatacgtatatgcgtagaaaaatctggaaggaaatattccaaatagtaatatcaaatagctctggattatatgattatagagtgttgtttttatgttgttaattttttttttttttttgagacggagtctcactctgttgtccaggctggagtgcagtggcacaatctcagctcactgcaatctctacctctcaagttcaagtgattctcctgcctcagcctcccaagtagctgggacaagaggcgcacaccaccatgcctggctaatttttgtatttttattagagacaaggttttgccatgttgccccatctggtctcaaactcctggcctgaagtgatccacccgcctcagtctcccaaagtgctgggattacaggtgtgagccactgtgcctggctgctgttaatttttttggcaaaatgagttttgccaaactcattttactgctagagagttttcttttttttacgtctttctataatatctgacttttttacatgaatataaacttcctttatactcaaagggaaaataatcaataatcctatttttatttttcaaaagagaaaaataaaggagggaaaagtctaatagaatgaaagtagataagagttgctcccaggccagggagctggaactaaccagaaggactagttcggaaatggcccaggctgagtgagataccagctccctaaacagcctctgacaagaggaaaggcagccatgcacatgagcaactttgaagtcagatggttccagaaagcgccaggcatgggcaccagatgctggtggtcctcagaggagagctctgcactagacacaaaggtcacatggccccagtcctaggagaagcatccagtctagacaagctaatgaaaaccatggtgatgtcaacagagagccacaactggtttcacaaaccactagtaaaacgttcaagttccagaaattgaaggaacacacaataaaacaataagtcctccctcttcacctatcaaaagagtaaagaatttttaaatgctggtgagggtgtgctggaattagtgctcattcactgctgttgggaattattgcattgctaatgtggtttgaaaagcaatacggtggctgggtgctgtggctcacgccggtaatcccaacactttgggaggctgaggtgggtggatcacctgaggtcatgagtttgagaccagcctggccaacatggtgaaaccccacctgtactaaaatacaaaattagccagacgtggtgatgcatgcctgtaatcccagctacttgggaggctgaggcaggagaatagcttgaacctgggagctggaggttgcagtgagccaagatcgtgccattgcactccagcctgggtgacagagtgagactccatctcaaaaaagaaaagcagcatggtgctatatatgccgattgttttaagatattcatatcattttgtaatttcatttctagaagtctgttgtaaggcaaagaaatataaaactttattatcaaagatactcattgcagtatgatttataatttttttaatgaaataacctgaaaactgtccaacaatagttggagtggtaagttctgatacaacctgtcagtggagcattatgtagccattaaaaaaaatgtttagagagcgtttgtcttatcactc

SEQ ID NO: 2369 - DNA, 800 bp, Homo sapiens
  misc_feature (1)..(800): DMR17:32276701
agtactccggccctagcaccttactccggccctagcaccttactccagccctagcacagtactccggccctagcaccttactccggccctagcaccttactccggccctagcacagtactccggccctagcaccttactccggccctagcaccttactccggccctagcacagtactgcggccctagcaccttactccggccctagcaccttactccagccctagcaccttactccggccctagcaccttactccagccctagcacagtactgcagccctagcactggactccagccctagcacacgtgcctgtgctcatttcccagggctcattctgccttggtgtgtgtacatgggagaagacaatggggatccgggtgggaacctgctctagatcccaggtctccaccttcctgactcaagaggtctttaccccagtggcagctggttccttggctctgggtactgcctttgaggtccttgaaagtactcacatccctcactgaggtccagggcctgtctagagcatggacagggagagggtcctcctgggagagagaattcaagccttggaggcagagaccagacgtgtgtttgccctgaaaatgcagctggtgaaaatcacacatacatcatagacacaagaagacagaggtatgtccttctctctctcatgcttccctgttgctgggcaaattctgaagccttggcctggctcatgggcctgcagctgggaggggagaagcagtgctgctgtcctgggtgctgagcaggcaaatcccagctccagcggggtttg

SEQ ID NO: 2370 - DNA, 1100 bp, Homo sapiens
  misc_feature (1)..(1100): DMR17:33005801
gggtacctttgtagctcttgctgctcaagtctttctttctttctctctctcttatttctttctttctttctttctttctttctttctttctttctttctttctttctttctttctttcttctttctttctttctttctttccttctttctttcttttcttctttctttccttctttctttttctttttctttctttctttctttccttccttacttctttctttctttctttccttccttctttctttcttttctttcttccctccctccctccctccctctctctttctctctctctttctttctttccttctttctttctttcttttcttctttccttctttttctttttctttctttctttcttttctttctttcttccctccctccctccctccctctctctctctctttctttctttctttctctttctttcttttctttctttcttccctccctccctccctccctctctctctctctctctttctttctttctctttctttcttttctttctttttcttttctttctttcgacggagtctctctctgtctccaggctggagtgcagtggcgcaatcttggctcactgcaacctccgcctcccaggttcaagcgattctcctacctcagcctcctgagtacctgggactacaggcgtgtgccaccacgcccagctaacttttgtatctttagtagagacggggtttcaccatattggccaggatggtcttgctctcttgacctcgtgatctgcccacctcagcctcccaaagtgctgggattacaggcgtgagccaccataccgttcaggtgtttctgtacatgcctgttgcccacctctgcccacctagactgtgtcttcttgatatatgaattcccagtacctaactcagtgcctggcacatagtgagcacacagaaaatgcttgtggagtgatggggtcagggcagagactccagcatggtactgggaagtttccctccgggaggctggttgagctgggtgtgctttggtgcccaccaatcactttgtattgggcctattttaactcagatagaactgcttttgtaaagaagccacaaaaggcagaattac

SEQ ID NO: 2371 - DNA, 900 bp, Homo sapiens
  misc_feature (1)..(900): DMR17:33302801
gttaacacagagtacagccaggtatctaccaggtactattatgggcatcttggagtggtttctcaggacaactctgtcagttgaataatattatccctgttttacagatgaggacacagaagctttgtctttccaattctattctctctgattctggtttgaacatagattaaatcgtaatggccataatcccatactctaaccattcactaagcacttactagaatccagcactgaattaaccctcatttttcaggtgaaggaaatgagtctcagagaggtaaagttaactgcctggggtcacacagaatgtgccacccaggtggcagagccaggattccaactcaagtgtgattccaacatattggtaattattagaaaagcagaacacccagagtttagaaagagaaaagacaaagtgggtggtggcatagttcagagttttgcaaaaacccttgggggagatgaagaaagtgaaagcagaattttttggggcctgaagtgggttctcagtaatctgctgtagatctgggagctatgtttttccgagcttgggtgtaatgtcaccatcgggacagaactaaaactatacgagcccacttgtagggaagaggttcagggaggtacccataggttcaagtaccaggcttggctaagtaaattgcagaaggccacacaaaaacatttcctctttcaacatcgaagtgacattacacaccgacagcaactacatggccacaaagtaggaacacatctttacaaaccacagggtttcaacctagccccctttgtctcccttcctccattcctttcttttccttctccctctcacttttctctttccttgcttgtctcccttcctttcagttcttcctccctttttccctcttattttcccat

SEQ ID NO: 2372 - DNA, 200 bp, Homo sapiens
  misc_feature (1)..(200): DMR17:35482501
ctcccgctctctgcagcatgctagaatcctgccccacaaccctgccccatgcagctgcagccacccaaatcgagattgcagattcaggcatctctgcactcttggggcctgagaagatccccctgccctcgcaggctcagaagtgcctgctcccactgcctggcttctccttctccctgctgtcggtgcccactctgatc

SEQ ID NO: 2373 - DNA, 3200 bp, Homo sapiens
  misc_feature (1)..(3200): DMR17:35874601
cagaagtttattttattttttatttttgagatggtgttttgctcttattgcccaggctggagtgcagtggcacaatcttggctcactgcaaccttcgcctcccgggttcaagcgattctcctgcctcagcctcctgagtagctgggattacaggtgtgcgccaccacgcccagctaatgtttttgtatttttagtagatacagggtttcatcatgttggccaggctgttcttgaactcctgacctcagatgaccacccgcctcagcctcccaaagtacagggatcacagacgtgagccaccgcacccagatagaagtttattttttaaatcttattgacccatgcagtatgccacatgattacatagcataacaaaggaattatatgtctcaaacaacacagaaattccgcctttgcttttgtgattactatcacattaaaaaaaaaaagaaatgtattccctagatggaagtattattcccaaatatgttctgatgtgctatgtacccaccttatttaaatatttcatcactcattcattctttggtttaatattttcattctttctctatgcatgtattggtgtgtctgtcaaagtcattaagctcttgtggttctcctgattctgtgcctaacagcattaaatttttttttaattgtggtaaaatattcataacataaaatttaccatcgtaaccatttttggatgtatcctgcacattcttgagcctaaatattttcagacaaagtgaagccttagattgtctggtgagaatgaggatttcttggtttctctttgtgtttccctttcccagcctcactcagagccacttgaccatctctttttctcccaccccggtgtgcagagatgaaaagggaacggaagcaatattctggcctctcatactttctagagtttgtgttcttatttagggtggtgtgagagtttcagacacagaccttgcccttgttcagccgggagtcatacaggaaatcctgccagacttgctgtccctctctctttggcatccttgacctgtggctaggaagtcaaaaggccaggaaaacaatacctgagatgagggtagctcaggcctccatttcctgcccccaacctccccgcagactgtgataccaaagaacagcccctccttgccaagtcttccctccttacctccatttttggcaccctctgcttgcctgacttcctccttctgcctaccccttaagagcggatgttctcaaagctgctgcccttttctcttctttgcgttttttcctaagtctctggccctgggcctggcacatagttgatgcttaatggatgtttattgaatgattaagtgaatgaatgcaattcactcattcattccttaagtttcacctgttatttttgtgtacgcaataatgcatttagatgataatgataataataagctaacatttatgcacctactgtgtaccagagcatattctaagtattttcatcttactgtgacccagtgggggaagtacttctattaccctattttgtagaggaggtaattggggttacgagaggttaattgaagggcctacactcaccaagtgtcatagctggagtcctaacaaagcaaactagctctagagccagtactcaccaaggcaggctgcattgcctttttaaaattgggatacccctttttcccacaaaagaatgtcatattttcagccctaacaccctttcctcagctaccaacccttcatttcaccatcaccactggacatatccacagggttatcttgctggcaccttagctctttcctctttaaacagctctttcacaaggcttaagatggttctacacttctccagccagaggtggaaacctcagtgtcatccttaacccccatttttctcccttgctcttgagctcaaatcacctgctagggcttgcaaattccacctttgaaggtttcaaaagtgtctgtctttgaaacctcctgtctctcctttccttcaggcactgttcagcctccaatactactcacgtggataacaacagtagccgctaaactggactcctgttttctcagctttccctgttctagctcattttacacttgacagctgcatttagcacttttgctgcattttcctgacactccgtgctttcctacatggagactgtacataaaccaaagtagaatcctgggggacagtcccttttcctgatatatcccattccctaggcttttctctgccaggccaaatctctcctcagacagcaccatttgcagcaaacctgtaaatccctgaagctgaatgtgtttcctctctctttcccttgtcatgtttttttttgctgtgtactctagtcattgctgtgtctgtcttgcccctcttattagactatgagtcccataaggttgggctgggacagtggctttagtaatctgtgtctgccaatagtatgtgctcagggaaggattttcttcttttgaaaaatatttgttttcagaaataaaattagtaattgttaaatattaccattatacttaaaaggattcatcagatccaaagtctgtctttgagtacctctaactttgccagtgtcataaatttttggattaaaaaacttcaccctggctgggtacagtagctcacacctgtaatcccagcactttaggaggctgaggcaagagaattgcttgaacccgggaggcaaaggatgcagtgagctgagattgcaccattgtactccagcctgggcaacagagtgagtgagactctgtctcaaaacaaaaacaaaaacaaaaacttcactcttatataagaaacttcagaattgcaccattttcattttttaagtctctaccataaatttcttaagcaattgtcactaatgactttgctatagtagaaagaggaggctctagagatggacttcatccctcatttactgtgcagccttggctaaatcaataaacctctctgaatcttagtttcaatacctgaaacatggagagaattatgcatacttgtcagagctaagtgtaatttaaagatcaggcacataagacatttgacacatagtaggcatttcctatatagtagggtttattatatttttccaaatatactagcttgcatatttaaaggtgaatctcatttccttatttcttctctgatggatggctttttgtttttttatttgact

SEQ ID NO: 2374 - DNA, 2600 bp, Homo sapiens
  misc_feature (1)..(2600): DMR17:36399301
ccagcttcatccatgtccctgaaaatgacatgaactcattcttttttatggctgcatagtattccatggtgtatatgtgccacattttctttatgcagtctatccttgatgggcatttgggttggttccaagtctttgctattgtaaatagtgctgcaataaacatacatgtgcatgtgtctttatagtagaatgatttacaatcctttgcatatatagccagtaatgggattgctgggtcaaatggtatttctggttctaaaagtcttaaaatatcctctaaagtagatttcaaaatacaacatacatgagcctgcaggagacctgctcacagaaggcatctgtaatttataggaagatgatgctgacactagattaaccatgcatttagcacacctcagttacagtgaaaatccaattttgtgcaaaaagtgggaaataaatggaggcgtgtttgctttacgagaatttatttgatttttgtaaatagaaaatggttttattacatgtaaaatataatttcaattggtcactgtgaggaatcgccacagtctttggtaatgatggaactaatttacactcccaccaacggtgtaaaagcatgcctgtatccccacatcctttccagcatctgttgtttcctgactttttaatgatcaccattctaaatggcgtgagatggtatctcattgtggttttgatttgcatttctctaatgagcagtgatgatgagctttttttcatatgtttgttggccgcataaatatcttcttttgagaaatgtctgttcatatccttcaccctctttttgatggtttttttttcttataaatctgtttaaattccttatagattctggatattagacctttctcagatggatagattgcaaacattttctcccattctgtaggttgcctgttccctctgatgatttttttttttttttgctgtgcagaagctctttaagtgtttattttaatatttgtgtaataatgtccagttttaccaagcagaatgatctacataggagcttttatgcagaactcattgttcttcactaagagcttgttagtccagtagtaaaatcaaatccatcctcagttgctatgtggctttgttaaacagttaaacttgagttggagatgctctgctatagggaggaattttcgctccccagatgtgtttgtatataatataatgtatttttcccctctcccctgtggaaactttgtggaaagattatttcagtgttaaccctgattgacattttagtaatcgaacaagtgtttgttactcctttactcattcatttatcaagtgcttaatgggtgccttctgggtgccagacactgcattagactctggggaatcaaagatgaatcacacttagtctctaccccctgggaatttattctggttagagaaattgtaaacacataatcatgatcctatgggatatttttaaagtatgaaatgagataatgtgtgtgaaaaagctttgtaagcttcacacatttaagattttttctccagtgcatagcatgatgtctgacatattttaactgctcgttacactcttgaatgaactggggaagagccaagagttatgagagcaaaatactagagtgtagatggattagttctgcctggatggacaggagggacgcggaggcttccaagaatataacttttgaactggacttggaagtataagttgtttatgttaagaatcgagaaaggaggttctggggggacagctatcagtcgttaaagtgcctggatttagatggaccacaaatctacaggcttatgcagtttacaagatgcttttgtttacagtatctcttttgagccttatgacaggtccatgaagtgagttcatacaaccaagacaagccttgaccagaacctgggttctagggtgtaagagacagcatctggccagtttattctttacactttcacaaatgttatgattgctaatattattgtatttctattattacatttgtgaaagcatggttttctgagttacaagtatatgaaagacaaatgtgtacatgtaataaaatacatagttttctttttttcttttttttttttgagacagagtctcgctgggtcccaggctggagtgcagtggtgcgatctcggctcactgcaatctctgcctccgaggttcaagctattttcctgccttagcctctcaaggagctgggattacaggcgcctgccagcatgcctggctaatttttgtatttttagtagagcaggggtttcaccatgttggccaggctggcctcgaactcctgacctcgtgatccgcccacctcgacctcccaaagtgctggcattatagacgtgagccaccgtgcccagccatggttttcttctgatttctgtaaagcaggttagcttgtattgatacatgaggaggtttttttcagaggtttcaagaaacaagctagaaaatgcttccataatatttcaaagattctttatgattcaagcagtttttcaggattttcagtccatttaaaccatttatctaacaaacactaagtagaaactatgagctctacattctcttgtaagct

SEQ ID NO: 2375 - DNA, 2000 bp, Homo sapiens
  misc_feature (1)..(2000): DMR17:36405301
ttacagagaaatactgaagtctctatagtggatttgtgtatttcttcattctgttccatcaggttttctttcacagatttcgtagtctggttttttgctgcatacacatttaggaatgttatgtcctcttggtggattgacccctctctcaataaataatttccttcttagtctctagtactttttctttgctctgaagtatactgtttctgatattaatatagtcatccacttttccttagtgaatggttgcatcatataccttttgaattttttttttttttttgctttcaatgtgcttagattgttatattcgaagtaaatgtcttgtacacaaaacagtgttaggttatgttttctttctttctttcttttttttttttttcttgagatggaatcttgcactgtcacctgggctggagtgcaatggcgtcatcttggttcactgcaaccaccacctcccgggttgaaccaattctcctgcctcagcctcccgagtagctgggattacaggtgcccgccaccatgcctggttaattttttatatttttagtagaaaccgggtttcacgatgttgaccaagctggtctcgaacacttgacctcttgatctgccttccttggcctcccaaagtgctgggattacaggtgtgagtcactgtgcctggcctttttttttttttttttttgagacacggtcttgctctgtcacccaggctggactgcagtggcacaatcatggtttactgcagcctggacctcctgggctcaaacaattcccccacctcagcctcccaagtaactgggaccacacatgtgcaccatcacacccggctaatttttttattatttgtagggacgaggtcttgttatgttgcccagcctggtctcgaactcatgggctcaagagacccttctgtcatggcctcccaaagtgctggcattacaggcgtgagccaccatgcttggctgtaggttatgttttttaaatctagtttgtcaatctttgtctttttctttttttttttttttttgagacggagttcatcactctgtcacccagggtggagtgcagtggtatgatctcggctcactgcaacctctgcctagtgggttcaaacaattctcctgcctcagcctccagagtagctattacaggtgcccaccaccatgactgcctaaatttttttttttgtatttttagtagagacagggtttcaccatgttggccaggatggtctcgaacaccgaacctcaagtgatctgctctcctcagcctcccaaagtgcttggattatggttgtgagccattgcacctggccagtttttgtcttttatttgctgtttttaggtatttgggtcatttacatacttacagatgttgtcagaatccttttttttttttttttttttttttttttgagacaaagttttactcttgcccaggctggagtgcagtggctcaatcttggcctactgcaacctctgcctcccgggttcaagcagttcttgtgcctcagtctcccaagtagctgggattacaggcatgtgctaccacgcccagctaatttttatatttttagtggagttggggtttcaccatgttggccaggctggtcttgaactcccggccttaggtgattcacccaccttggcctcccaaagtgctagaataacaggtctgagccaccacgcctcgttttagttttagttttttgattgttctttttcctgctttcttttgagttacttgaacatttttggaatcccatttttcttgtcgtattttttttctaccccaattcactacgccaaaaccatttttctttattgtattttatatctgcttattttagttcattgatatggtttggatatttgttccgctgaatttttttttcttcttttttgagacaaactttcgttcttgttgcccaggctgaagtgcaatggcgtgatctcagctcactgcaacctccgcctcccaggttcaagtgattc

SEQ ID NO: 2376 - DNA, 1800 bp, Homo sapiens
  misc_feature (1)..(1800): DMR17:36558501
gctggagtgcaatggctcgatctcagctcactgcaaccactgcctcccgggttcaagcgattctcctgcctcagcctcccaagtagctgggattacaggtgcccactaccacgcttgactttttttttattttttagtagagacagggtttcgctatgttggccatgttggtcttgaactcctgacctcaggcgatctgcccgccttggactcccaaagtgctcggattacaggcgtgagccaccgtgcctggctgaggtctttttttttttactctgagtgaggtgacaagctttgggaaggttttgagcagaagagtggcatagtctgatgaaatctggcttactttgacctctgtattgagaatgaatgacggctttggaggtagtgaaaaatggttataaaggatcctggatatattttgaggaatgagccagtgggattttttggatagattggttgtgagggaggccatcaaagatgattctcagatttgtgatgtaaagaatggacaacaggccttgcgtggttgctcacacctataatcccagcactttgggaggtcggtgagggtggatcaccagaggtcaggagtctgaaaccagcttggccaacatggtgaaaccccatttctactaaaaataaaaaattagccgggcgtggtggcaggcacctgtaatcccagctactcaggaggctgagacgggaatcgcttgaacccgggaggcggaggttgcagtgaggcaagattgcgccactgcagtccagcgtgggcaacagagcgagactctgtctcaaaaaaaaaaaaaaaaaaaaaaaaagaatgggcaaatggttaccatttaccgagagggacgagactgaggagaaatgtaacagagctcatctttgggtgtgctaagtttgagatagcgattagacatccaaatagaattcagagaggtctgggttagagatgtaaatttgtctcatttagtgaatataaataggaaaagaagaagaggtctgaaaagtaaacccgaggctttcctatttagagatggtggtagggacttttgatatttactgtgcctgggcttgagaaaataagccttggagtgtttttgaacagaggaataatgtaatctgattcatattttaaaaggatcactgtagctgctgagtgaggcctggaatgtaaagggcagaaggtgcagcaaggagaccatttaggaggccagctattgcagttgactaagctagagattggtgggttggacagggatgataatggtagaggtgataagaagtgatctgattctagattggttaatttttatttagcttttattctatcttatttattaatttttttgagacaaagtctcactctgtctcaagctggagtgcagtggtgcaatcttggctcattgctacctccgcctcccagattcaagtgattctcgtgcctcagcctcctgagaagctgggattacaggcgtgcaccaccacacctgtctaatttttgtattttttttagcagaaatagagtttctccatgttggccaggctggtctcttaactcctggcctcagtctcccaaagtgctgggattacaggtgtgagccaccatgcctggcctcattttaaaattttctgtagagatgaaaattttgctatgttacccaggctggctttgaactcctggcctcaagtgatcctcttacctcagccttccaaagtgctgggattataggcatgagctactgcaccaggcctgattctagataatatttaaaaggtagaattggcaaactttgc

SEQ ID NO: 2377 - DNA, 1600 bp, Homo sapiens
  misc_feature (1)..(1600): DMR17:36580101
aaaccttcagtgagtttcattttgcctgctaatgtccagtagtatgaagtaaatgctgtgtgaatgccatggtataaggactatttttctttctttcttttcttttcttttctttttttttttttgagacggagcctcgctctgttacccaggctggagtgcagtggcatgatctcggctcactgcaagctccacctcctgggttcacaccattctcctggctcagcctcccgagtagctgggactgcaggcgcccgccaccacgctcggctaattttttgtgtatttttagtagagacagggtttcaccatgttagttaggatggtctcaatctcctgacctcgtgatccgctgcctgccttggcctcccaaagtgctgggattacaggcatgagccacggcgcccagcccttactcgttttctctttgtatttttgtaccttcagagactagatcatctaatcaggttaaatagttttttcattatgtcagtaaatggtatgtttacttttgttgtgttaaaattctgaaatttaggccagatatggtgtctcatgcctgtaatcccagcactttgggaggccaaggtgggcggatcacttgaggccaggagttcgagaccaacctggccatgatggcgaaaccctgtctctactaaatatacaaaaatcagccagtgtggtggcgcatgcctgtggtctcagctacttgagaggctgaggcaggagaatcgcttgaacctgggtggtagaggttgcagtgaactgagatggtgccactgtactccagcctgggcgatggagcaagactctgtctcaaaaaaaaaaaaaattctgaaatttaaaactagaatcttgctggtttggaataggagtgtgtatattaccacagaaaacaaagggaccgggcacggtggctcacgcctgtaatcccagcacttcgggaggctgaggcgggtggatcacgaggtcaggagatcgagaccatcctggctaacacggtgaaaccccgtctctactaaaaaatacaaaaaattagccgggcgtggtggcgggcacctgtagtcccagctacttaggaggctgaggcaggagaatggcgtgaacccaggaggtggagcttgcagtgagctgagatcatgccactgcactccagtctgggcgacagagcaagattccgtctcaaaaaaaaaagaaaagaagttctgaccaatattcaccctcaaccttatttttataatagatgaccgtggaaaaagtacagggtattagcagattggaacaactttgtgaggaattttcagaagaggaacgagtaagagaactcaagcaagaaaagaaacgccaaaaacggaagaatagacgaaaaaataagtgtgtgtgtgatattcctactcccttacaaacagcagatgaaaaggaagtaagccaagagaaggtaatatttcttaatatcaactcttaagtgtgtatgtattgcttgtagatagaagtacaggccaggtgtggtggctcacgcctgtgatcccagcactttgggaggcccagggtggaggtatcacttgagcctaggagtttgggaccagcctgggcaagatag

SEQ ID NO: 2378 - DNA, 2400 bp, Homo sapiens
  misc_feature (1)..(2400): DMR17:39593201
actcttctggtggggagacatcttcaaggactgaaggggttatcatataactaggtggaaggggataagggaagacgggagagagaaaaaagagaaaagagaaggagaaagaatgtgtgtgatggatgagaggatgaaagaaggaaggaaagagggaggaagagggtggagatgcagatggcaagagtaaggcagggcttgagtgaaccagacagactcctgtgtccagggaaggggcagggaaagtgtgccagttggagcaaattgctcccctcaagtgtcccaggggcccagataagactggaattccagcctagtcctgcagctgttcacagtggcattcttcacccagagctttgggcaaaaagaccctgtgggccaggactaccgatgtgaggagcagctgctctggcgaggaaggtgaggtcagatgcagtcaagtgcatgtgtggtttcctcatgggtggggtgaggacagtgggtgtctcctggggtgtttccacctattcatatgtaagcagtggcaggaggcagatgccacatgcttgggtaggccctggagagtgggtactgggttaattgaggatgaggagcaggcagaggaaaaggaagaagagagcagagggagaggagtaagtaggaagaaaaggatattggatcgtcttctagaaagttctggaccttctgttattctcttttcttcctacaatttgagaaaaaggcctaggctcagctgggtatggtggctcatgcctgtaatcctagcactttgggaggctgaggcgggtggatcacttgactctaggagtttgagaccagcctgggcaacatggcgagactccatttctacaaaaatataaaaaactatctgggtgtggtggtgcatgcctatagtcccagctactcgcgaggctgaggtgggatgattgcttgagcctgggaggtggaggttgcagtgagccaagatctcaccactgcactccagcctgggtgacagaacaagatcctgtctcaaagaaaaagaaagaaaaagaggaagaaggcctaggctgccagctgggcacatctacctcagtgtctttgtctgtggtataagtataatgacagtcccaagctcatagggttgttgagaggattatcaactcatgtataacgctgagtcaattactaacatatcacaagctccaagtgtatgttaccttccatattgttgttgttgttacatcttggttttgcactggatcattggggatttctttttttttttttttctttttttgaaacagagttttgctcttgttgcccaggctggagtgcaatggcatgatgttggctcaccacaacttctgcctcccaggttcaagcaattctcctgcctcagcctcccaagtagctgggattacaggcatgcaccaccacactcggctaattttgtatttttagtagagatggggtttctccatgttggtcaggctggtctcgaacccctgacctcagttgatctgctcacctcggcctcccaaagtgctgggattacaggcatgagccaccgcacccggcccagttcaggaattcttcacgcataactagaccttcttgctatgcccttaggttcaacacttttaggtcttcctttgcacacatggaggactgtgatttcttagatcttcaaatttactcctgaagagaggcagccaagaggttttctggaatgcaaagcgaataccccatgataagaaaagtctagggtacaggtcactgagttttcccaccagaggctgtcacggaggttttcctggattcctgaagaaattggaccctggacctacatcagtgcctccctatccagcctggagcctcagccatctgccccatgcagtgctcctgtccgggccccacccaagcctgtgtgggtttgggtcatttcttccagactcctcttccaatcccaattccttctcttcattcactttcttcaactcaccctctgctcctttcttgtcccttttcttattctcaggaatctagttggaaggaaaggaattccctcactacttagagtgggattcccccaccctgcatgggcagaatggatggtctcctgctggaggtcaaagaagcatgtggagactggcctaggaggggcgaggggtggcagggcagtccccatgtccccctattctccccagctcctgtctcatcactgtcaccattcaatcatagcagatgggctgcagctgtgagcgccagcccggcacacaggctggtccgtgccacttgggagagaaggaagagaaagggagggagggaaggaggagggatgaagggaggagggagagaggaaagggaagaagaggaggaggaggaaaggaaagagagtggaggaggagagagatggct

SEQ ID NO: 2379 - DNA, 1400 bp, Homo sapiens
  misc_feature (1)..(1400): DMR17:40314201
acgagctggggaagggattgggtgacagcccaccccatcagctctggtaactcaatccctgcaccccaccctcccaatttccctcctgctcaacaacttcagcagctgctggcagaagcaaggctggcagaagtgtgtttgagtgcatgtgtatatgaggggagagggtgagaggggctgtgggggcagggagtgctgccaggacatgttaaaggagactcacagcctgggtacaacttgggtggcaggaggaggtggggcaggtgggagagtgggtggtgagtgatgggcaggctgcagtgggggcagggcagcacaggggtctcacaaaacttgttggcactggagcggggcctggtgtggtgggggtgggcagtggtgagggggcaggggctggcacagacattgctggccccagaatgctgaggcccattctttgccagggggcgcatgtaaccatggagggacagtctgcccctgtctgcaatccttgggctgtgcctgctgggcatcacagtcttggtggtgactaagtcacttctgtcctggggctggcaaggtgccaggctcagctcttctcggtaggtgagtcactgccctggcatctcccccggatgcagctgagtcacccagccatgcctgctaggcaggtgggcaccaggcttgtggtgggggtggagggctatgtgtgcagcccccagtgtcttctctgatctctctctggcatgtcctggccccacccataaacctgcagagccaggcaaggatggcgcttctcccttgtgatccactaaggggtgaaggaaaaggtagcagggcacagagtggagtcatacatgtttgatttggagtaagtaggggaggaaagagttgaggagggaacattgattgggttatatgtatatatatatatatatatatgcttatatgtgtatatatatatatatatatatatatatatatatatatatacacacacacacacacacacacacgtatatatttatttattttaacaaaaaagacacagggtcttgctatgttgcccagacaggtcttgaactcctggagtcaagcaactcctggcgtcccatcttggcctcccaaagtgctagaattaaaggtgtgagccaccatacctggcctgggtttgaatcccagccctgccattgacaagctgtatgacgttgaggaaggcaattttctttttgagcctcagttttttcatctctacaatggcaacaggagcctgccccttcaggactgtgagaatcaaatggagtgggactattaaggtacttgtgggaggagctccttttgggatgagctaggaggcttgggaggggaagaggagtcagctggagctggttccaacaaactcccgcaccatggtcttggag

SEQ ID NO: 2380 - DNA, 500 bp, Homo sapiens
  misc_feature (1)..(500): DMR17:40905201
ggaagaaatggaaataaaagctaaagaacaaactagtaatgattcggagtgagacccctaacacctcccgaatgggggcaagaagctcaggactctggtagcccaggcagagtctgagtaactggcgttgcctctcttcatgcatctacctgatccacctgtccttctacccacccctctgatccctaggaattctgagagcctggtatcacccaggtacaagatgaagaagtctattgtcccctagagggtaaatggcaagaggtgcagtttaggaggattctcagtctgggaggagaagctagctgagagcttgccacagatgtaagcaggaacgcccggctgaagtgggaacgaggcagaggctggaagacacagcagagtgctgtgcaacagatgccgcctggcagacatggtgctctcatcacaagagactgttatttggtactgaagtagccttcacattccatagaaaaatgtctttctattttttatattat

SEQ ID NO: 2381 - DNA, 2700 bp, Homo sapiens
  misc_feature (1)..(2700): DMR17:41364501
gacagtcctgaagacagaaagatttatttggccatcaacatccaaaaaatctctactggaggaaggagtcaagtcccatgactatcttttgtaaaagaaagtatctttagcccagataatgttagcaacaaatatcctacacttcccacggctgtaatataaaactctcgcctctacagacagattggcatctgaaacttgattttcaaagtctctgttttatcctacagtagaacagtgcctgtcccttgcaggggtgccgtccgccaggtactcacttgcagtcctcgctctccagcaggctccggtatgtgttgatctcacactccagccgcgcccgcacgtccagcagcacctgatactcctggttctgccgctccaggtcactgcggatctccgccagctgggactccacgttggtgatcaggctctgcacctgggacagctgggagctgtagcgggcctcgctctctgtcagcgtgttttccagagagtatcgctgtggtgggaaagatcaggaatgtcagagagctgctccttatagggttcctccatggggttcgaaaaaactcacaagctccaagagctaagaagagtgtgtggccccaagggcatccccaagactctgcctcccaagttcccatcgctcaccagcaggtctgaacaatacacaccaggttgtgctgggcctgcagctcgatctccagggcattgactgtgcgtctcagctcgatgatctccgcctggtaggactgcagctgctccgagctggataccacctgcttgttcagctcctcggtctgaaacacccaaggggagaaaggatcagaccctgcctccggggccctggggggcctcgggtcctgagtggccacgtgcttagatgcccacctgcgtggcgaaccattgctccacttccctgcggttggtttccaccagggcctcatactgattcctggtctcgttcaggacctggttcaggtccacagcgggagcagcgtccacctccacgttgaggcggtctccaagctggcagcgcaaggtgttgacttcctaatggagaaaagggaagaaataaacccacagaaagaagtctttcaataacttctttgaggcagttcaatataatgggaagaggattgcattgcagcttaggaaacatgagttgaagcccagctgtcacctctggaaattctggcctcttctctgaatcccttccctcatctgtatgatacggctgcttcattaaatgattgctaatatttctacccagtccaagattctatcatttctttcttatttcccctttgctcagtgataagcctggcatgataattggcttacaattgttgctacttaaatatagagaaaccaggtttcattcctcctatttatttcatgggatactactagagtatgacacatgttttcatcatgaaaacgtctaatgtttgagacatgcatctgatttcgtagtattgcattcagccatgagatctgaatcaaccattatttgagttatttcatttctcccgtttttcccatccatcagttcatccatccatccattcatccatctatccatttatctagcttgagttctagttatctaggtgaaacagagtgtaagaatgttttctatctccttccagtcttggtcattaacctacctggcacctcttcagaagctaatagatagcatcaaacagtagacagtagtttaaagatatttgtgtgacctttcagccatacatgtctggtcccaaggggaagtaggtcagcttaccacactcctttatgtaaaaaaggtaagctgtcactcattccccaacaagccccaaagtatgttttgagcaaccagcaaaatgttgttaggcctagggtgcttagcaaatcaaatcctaccttatcctattcagggggatcacagagctctcagtattgggatattgggggctgggactcttacctgctcatggttctgcttgagggacagcagctcctccttcagggactccatctgggcctccaggtcagacctgcacagggtcagctcatccagaatcctgcgcaggctgttgatgtcggactccaccagctgccgcagggactgctccgtctggtacctgcacacacagccagaggtcaaaagaggtccaaaaaaaaaaagtctttgtttcccggcctttacttggctgacttagtcaattttattatattttgaaatattttgaatttaaaaaattaagggagaaaatactcctgtactgagtgagaaggcctattttgtcactgagacacacagaaaaggtattggtggaatgcctgtggatagtttagtctaacacaaactaagtttgttctaagactctcgtttacaagttactatcaactaagccctgctgcttttgccatctcaagtgaatcagtgcccttcataagcctgctccaggttgtcctgtcatcctttccagccttgccaagaagcaatctagtgttgtggaagaaacactgaattcagagttagagccagtattctcattaaatgactgtagatagatacctttatctctctgaggcttgatttccttaactgtaaaatgaagacaaaactaacaccttatagggttggactgaagatgatatatgtaaaattatgttgtaaaatgtaagatcccaggaaaatgcaaaggattctca

SEQ ID NO: 2382 - DNA, 4700 bp, Homo sapiens
  misc_feature (1)..(4700): DMR17:41516201
cccggtgctgcgtccatctccacattgacctggccggccagctggctgctgaactccttcatctcctgcaggatgggagggacccacttagagacggagagcagaagagagacctgagagtctggcgtcacacatgccaatcctggctctgcccgtaacacaccccaaccgctgttccccattgcacatgaagaggtttggtcacatggacccctcagctctaaggagttctctgctgctctaggtcctaccaagggaggaccccgagactgtagggccctgatgtgagctcacaaagccaatcaggaagtcaaccattcatacgggccacctgggctggctgtgggcctgggctaccagacactgccccttcctctccatgaggacacctggttttgtggggtaggtgtgtttctgaaccactaagccccaggccaactatgaggaagtaccaacagccccactctgcctcccactgacttaatctcgtgaaaatctgggagggcttcctggagccactgtctttccctctgggcaatttaagtgagttttgggaagaggttccccacctctctcgggttcaggggtgatgggggccagctctcacctcttcgtggttcttcttcaggtaggctagctcctcattcaggccctcgatctgcatctccaggtcagtcctggccagggtcagctcatccaggactcggcgcaagccgttgatgtcagcctcaacgccctggcgcagggccagctcattctcatacctgaggagagggaggccaaagaaggaagtgggaggggtcttggctgcctgagtcagagccaggagaaggccaagtaaagtgggcaatgcaggaagaggagagagacgggggagcgcacttgagcctgaagtcgtccgcagccagcctggcattgtcgatctccaggatgacccgggagttgtcgatggtggtggccatgatctgcaggagacagagtcggtgtctagaggactcctctctctcccctgctgctctctgctctgcacccaaggccagcccctcattgaaaatcacccctcactgacaatcacccctctgacaccaccaacaaaaatctgtacggcttctggggtgggcaaagtccagcctcactttcagtgtccatttcttgttttgtcccatccagcctccttgagacacctgaggagctgccttccttatctccagggcacgaaagaccaaggaggcagtattgcctgtgggaattggttgcccaggagagtggggcagtggggtgcagccagctctgacaatagctctctcagagacactccaccagccccactgtggacaactcatggtcactgcctcctgcacaccttggacacagccatggatctacagaacattccagccagtagcaacctggagggcagttaagaaggcattttacgaatgaggaacccagtcttagggagtaaaatggtgagtgagtgggtggcagaatgtgtaatgagttcccaggtctcctaagacccaacagtacttttggcacaaaagacctctttataggaaaagacaagaggttctagcatctggaactcatgaggccacactccaatcccattcttgcaaaagaggtaaaggaatactttatgcagaagcctgcagggtgcatgaggtagggagggcgagttgctctttttttttaattatttttatttaattagatacaggttccactctgtcacctaggccggagtgcagtggcacagtcatagctcactgcagcctctaaatcctggacacgagcaatcctatcaccttggccccccaaagcactgggattacaggtgtgagctactgcctctggctctttataattgcccccacctgtgcccctgttggtcctaaccagattcccaagacccctctctccctcccccagcaccaccaagttgagaagatgtgcactggcctctgcacctggacagcaggtgcattccaaatttgctgagattacataccagacagtcattgcctgggcaggaaaggatttccttgagtcagcagtaacactgacattagagctgtgtacagggtaccagccacctgctcccctctctttgacatccgaggactcaccttgtcccggagctcttcaatggtcttgaagtattggctgtagtcgcattctgggctggttggggtctgcttctggtaccagtcatggatcttcacctccaggtcagcattggcctcctccagggcacgtaccttgtccaggtaggaggccaggcggtcattgaggttctgcatggtaattttctcattgccagagaggagaccaccatcgccaccaccaaagccaccaccaaaacccccaccaacgccccctccaaagcctccaccgaaaacactaccagcccctccaccaaagccacagaccctcatgccacccccatatcctcctcctgaccctgaagagacaaacctagcagaagaagctgagatacttcggcttccacctcccccagagagactccccccaccaaagccacctcccccagccaggagggaaccccctcgggttgagccacccccaaaggtggaggaagaagtttgcagaaatgtggtggtcatggccaggtagctggagcccgtgagttctcagcaaacccaagagatgctggcaggaggtaccaggccaggctgcacgctggggctccttatatacccttcagagggtgttgtgggacctcgtctcctcccctaaagcaaagccaactccttctgccttcctgacaaacacagctgcctgcacaccttgagtgggtcatgtgaagtttttctcttctatttttttttaatgcaacaaaagagatgattcagaattaatagtgtttttccccagggcacggttttaacacttggattacaggttcatctctccatgccagaagagagcagcagggagcgaactctcatcacagcacagctaccaaggcctctgcctgtactgagagcagctcaggccaactgtgccctcagctggacttcacttccccgagccctgagcctctccccaagaggacagctccgtgttcttagtttgggagtccactggccgatcattatgctgtgttatccaactcaaaaccctgtgagtgagtgagtgagtgaatgagtgagtgagtgagtgagtgagagactgcagggctcagggagagtggaggccctggggatgggaatgcagggcccctgggggcaggtggaggacaggagccagggaccttgagtagtgttccagctgaggtgaccagaggagccagcatccatccccttacctggtgctgcagatggactcccctcctcccacctctactcccctcctgccatcctccagcctgtgttcctggcaccctcacaaaagcccagcaggcttgggactgacaaggggatgactgatgatcccgacacctgccaactgcacggcgctgaacctttgctcgtttctgggatgtgttggggcaaacctccgctgataaggctggggcaagttccaggaagcccctgccttctccaggagaggcatgtcgctgcttagcagggccagattagcccccatctgtcctgtcaagtgctggctggggacgggccgctgcagaaggctctatgtgcctgaatgctgtggaagggaagagaagggagactggcaggcaggctggaagacaccggagatcttgaagaccaaggcattgcttcacacagacggggagttgaacactcaggagagcccttttctctgccaccagctcagggacacctttccagggacacctgatacctgtgggcagtgccacttggaggtgtggctcagccctctggacctggccccagggcttacagaaactcaggaggaggattcctagcccaggttgcagcatggtgaagtggacagggctctggagtccctcaggcccgggtttgaatcctggctttatcaattatcatggtaagactgtgaggcctgggttcaaatcctgaccctaccaattaccatggtaagactgtggacatttacctttttaagtctctgtttccctgtggcaaggggcgctctcaactctcacttccagggaagccctgtggcccaagagcccccatcctgccccctcctggatccccacccaggtgccagacatgcaggggccagggtgcatgaccggcacctgcgcctgagtgccctcaccaggaggggctttgtcgttgggcatcagaacatgccctgtgagcctgagcatgttcttaggctcaacggcatcgaccttccatagccagctcctatggggcaacgcaggttgttcttaggttcttattttgctataatagcataatcctttacttctaccctgcactttgtgatttacaaagcacttttgcatccatcacctcctctcatcctcacaacagagggtgacccccacccaagattcagaaagaatgaaattgaaacttggagaggtgaagcaacttgtgccaggtggcaccactggtaaggggcaaagccaggactcaaacaggtcctcacaccctcaaccaaacagggcacagggaaagagtccttcctgcagaccccaaattcctgcatctgagctgggctggcaaggggaactgccagccagcaaggctgggggtgggttccttctcatccat

SEQ ID NO: 2383 - DNA, 500 bp, Homo sapiens
  misc_feature (1)..(500): DMR17:43184701
aattataggacatatctttaagtttcttgagttttgttagtctagaattaacctttttggaaacctgagttaagattccatagagagagtcttgtataaaaaccaattagactaggcgcagtggctcacacctgtaatcccagcactttgggaggctgaggcggcagatcacgaggtcaagagattgagaccatcttggctaacatagtgaaaccccatctctactaaaaatacaaaaattagctgggtgtggtggcgtgcgcctatagtcccagctactcgggaggctgaggcaggagaatcgcttgaacccgggaggtggagtttgcagtgagccgagattgcatcactgcactctagcctggtgacagagcgagactccacctcaaaaaaaagaaaaaaaaaaaaacagaaaaatagtaacccagttaaggagaatcttacctaatttgccatcttaaaacctacttttatgggtttttttgtttgtttttgtggaa

SEQ ID NO: 2384 - DNA, 1200 bp, Homo sapiens
  misc_feature (1)..(1200): DMR17:43223401
taatttgaaataattctagtctcctccccttactcctgctaaggaggtttctctggactacacacacacacacacacactcacactctctctctctctctctctttctttctgtcacccagagtctgtctttcacagtctgtgtccctatcttaccttgagttgtgaatacccagtgtttctgatggggctagattggcatgggttcatgagacctgatgatgaaacaaagtacaggttactcatccagcagttttccaaggatggaatactgcaagcctggagtgcttgtgtctggtgacccagggggtgatgggggtgcagtgaggacaggctcctacctgggacagggcacagactgagcccttcctgaagattctcaactaggaagctgtgctgtggttccctgttccagacctcacggggctcagtatatctgttaataagcctacaactcatgtcccaccctctgatcacccccacctcctctgtcacgcttactctggaagaagggccgacagcttctcaaccactctctgcagaagttggaaggctcctttgcagccgtaggttggcattaacccacccagggggagttgaccagcaaggcattaaaggccgagggtacttgggagagtcagagagggtagggtggtagatatggattctacactacagggccgggatggaagcaaagggctcctctccttaccacctcccactcccaggctccagtccagagtctgtaaggattttctgcccaccctggaatctgttgttgatacagagattgccctccagcttagtagatccccgctgaagtaggctggtgacctggcctttgggaatcctggagattgcatttggaggtgtgctgagtacaacgggcttgagcacttggttgtgttggctgaggtggtggctgtggttgtggtggctgtggccctggccacacctgtgcctgtggcaatgttgatggctgtggtggtggctgtgatggtggctgcactgatggctgctgctgtgatggctgtggttgctcctgtgatgtccacaatttcgccactggtggttgcggcacatttaacttcttatgtggctggagtttttcctccgattgttgttcttcctcctggtgattcttcagttcctggcaagaagcccccgggcaagtggcatcatcctctccccacccaatcac

SEQ ID NO: 2385 - DNA, 1800 bp, Homo sapiens
  misc_feature (1)..(1800): DMR17:46264601
aaattaataaactggcattctggctacatagatcagtctctttgaactctttgtaccttccaccattagtgtgatttctaaggctgcaagccagacactgcccaagacccagcactggactctggtgagttcttccagctgttgccaccccaggaggctctgggagcccctgggaaccatccagcttgctctctgtctctacatttcagggtgtgggtttcagggcattcacaacattcctgcaacagaagagttttgggaacacccccagcaggatgtgggtgatttgaatgtatgtcagagatgtggttgtaactgagaaatcttaagcctagtgaattttattccacttgacttaaataaagagcacgtgaaagaaggggatctgaggacatctatgaacagggccccgagggcatgaacttactagtgtttatatgactagtgtttatctgggcctgtctagtctggagaacctgactctggtgtacccaagctttgcagtggctgtagaggtttgctcttttggagggagaagataattcattcctccaacacctgaatgagggtagattaacccacctccttcagctgcaatttggcaaatttctcttctttgatttaatgctcaacggacaaatttcctttcttcttcttcttcttcttcttcttcttcttcttcttcttcttcttcttcttcttcttcttcttcttcctcttcttctttttttctcctcttcttcttcttcttctcctccttctccttcttctccttcttcttttctcttccttctcctcctccttcctcctcctcctcttcctactcttcttcctcttcctctcctcctcctcttcctcctcctcttccttcttcttcttctttctttttttttcggttttgagacagggtctccgtcacccaggctggagtgcagtggcacgatctcggctcactgcaacctccacctcctaggctcaagcgatcctcccacctcagcttcccatgtggctgggaccaaggcgtgagctaccatgcccggctaatttttgtattttttgtagagacagggtctctccatgttgctcaggctggtcttgaactcctgagctcaagagatcctcctgtctcaggctcccaaagtcctgggattacaagcacgagccaccatgcccggcctcaacaggcaaccttctgattaataattagacctctgtgccggccgtcgtggctgatgcctgtaattccagcactttggaaggccaaggcgggtggatggcttgaggtcgggcgtttgagaccagcctggccaacacggtgaaaccccgtctctgctaaatatacaaaaattagcctggcatggtggcgtatgcctgtaatcccagctacttgggaggctgaggcacgagaatcgcttgaacccgggaggcagaggttacagtgagctgtcatatataatgaaacagttttactaaacttaggaagcagtgacttggtgtctctagaaattgcctaacatacacattccaggatacattctctgtcatctggaatctcctcccttccacaaacccacgctgtcttaagcactattttcctatttgttgttgacctaatctagaaaaaagcggccatcactctttctcccccactcagtccctcagtcccgaaacacccttattctccgcacttgtcaccccaccctctgctgcccccaccgcagcgcgcaaacgcacacgagtttaaagtttaggctgtgatgctatcctcgcccgcagatcacaggacagacattctcgggg

SEQ ID NO: 2386 - DNA, 200 bp, Homo sapiens
  misc_feature (1)..(200): DMR17:46330901
tccagccccaagggaggtggaacagccccacacacagcaggggcctgagaagttagcgggaaacgccgtctacaccaagccttcgttcacccaagagcataaggcagcagtctctgtgctgaaacccttctccaagggcacgccttctacctccagccctgcaaaagccctaccacaggtgagagacagatcgaaagact

SEQ ID NO: 2387 - DNA, 1600 bp, Homo sapiens
  misc_feature (1)..(1600): DMR17:46382701
tcactgtcctgaagttggtatagattctttctgtctacatctatgcatgtttatgctcaaaaacaatatattgctttgtgtgtctttaaaatgtatataatggttttatgctatatctttctttctgcaacctgcatttttcacttaaaataattttgaaatttagtcctgtggatatatagtgagccaattaattctgcttagctactctgtagtctgttttgtgaatataccacaatcatctactttcttattagaggacaatttaggcagttccaattttatttttcccggaatgtacattattttagtcgagtgccattgccacattagcgatattttggttagtgagggactgcagataggaaggtgatcccaaaagattataatgccatatatttactctacctttctatatttacatatgtttagttacacaattacccattatgttacagttgcttacagcatttggtgctgtaacatgctgtacaggtttgtagcctaggagcaataggctataccgtataggtttgtgtaagtacgctctatgatattcatataacgatgaaatcacctagtgacacatttctcagaatgtatccctattgttaagcaacacatgagtgtgtgtctccatgcatatatgtgtaagagttagcatgtgtgtccagaggtagaattgctgggcgataagtcatactcatctttacctagttatgccagtttatactgtcactagcagtatatgagtacctgttatttatatcctctccaacacttaatattgctgacattttaacttttacaatataataggtgtaaaactattgtttaaatttgcatgttgtcctcattactagtgagattaagcatttttcatattggtcattgggatttccccttctgtgaattacttttgtatatttgctcattttttctgttgggctgtgtatttttttagtgatttgtataatttttcgttttttggggggtagggtatgctttggattctaatcctttgttgtaaatagcttctctcagacagtgatggtcttttcatgatgtttatagagtgttggatttaaattttatagttataattaccctttttttttttttaccttggtgatttgtgcttttatgtgtttttcaggaaatctttctccaccctgaagtcattttcttataaaagttttaaaattttgccttgcacattttggtgattgatcaggaatttatttttgtgtttggtgtgaattatgaactaattttatcttttccatatgtataaccagttgtctcaatatcatttattgagtccatttttttcctttactgatttgcaatgctatctctgtattatatccagttcccatatacgtgtgggtctaagtgtcgactctattccgtttcataattctttttgtccatatttgcatcaataacactgttttaattgctgtagctttaaaattattcttgttatttcatagggcgtactttcattacctttcttaatttggcatttcttggctcttttccgtacgaattctgggaacaacttaatccccactcctttaaaaaaaaaaaaaaagac

SEQ ID NO: 2388 - DNA, 1100 bp, Homo sapiens
  misc_feature (1)..(1100): DMR17:46511801
tctatgccaggcactaaaataagatgaagcaccttcttggagtttacatgctggtaattatgccagacagtaataaaataggtaagaacggctgtgggggaagtcagctgggttctagttacagtcgcatttcaggaaatgatttaacatgctgactttaacaacctaagcctcttctccatgtgtgcacacagggtagatctctgaacacaggtgaccctagaagtgctgtaacttctaggggaatggctgtgttgagtcaaggcaggatgacagttcagcctcctcccaggctagtgcaaagggctcttcactcggattaaaaccttctctcccagaccgaattgccaactcccaacacccctcctacagaaaatgtggagtcctcgcttattccctggcagcccctacctaatagggtggtgaattaattatcaaacatgcgacagtttagcgaaaatggcaacactttggaataagtgactgtaatgtgcatcctggcgcccattttgcaggtcagttgctctccctggaaggaagagtgttctcggatttcaccttaaaggaggaaggctgccagaactgaactagcacttctgaatatcctgaggcgaggtccggtgacttccttgggaagctctgccgcgcccccaccccaccctaccccaccctaccccaccacagcaggcgctggagtcctgggaccaccagggtctgaggcccaaatccttcctcactaaggggaggagaggggtgttccggcagggcaggatgggaaggcgtgcttgggcgggattgtgacataagagtgccctggtgacatggagcagatctgtgacataaataaaggtgtcataaagacagggcggggctcacgcttagaaggggcacgagcgtctcggagctgccagaatgtcttctgctcagtgcccggcactagtgtgtgtcatgtcccggctgcgtttctggggcccatggcccctccttatgtggcaactattgtggctactagttaaggaggctcagcctctggagtgggtcaaggacccgctccagctcacctctaatcccctggggccgcctgactcctggtcttccca

SEQ ID NO: 2389 - DNA, 1200 bp, Homo sapiens
  misc_feature (1)..(1200): DMR17:46840701
gcgtgagatggtatctcattgtggttttgatttgcatttctctgatgaccagtgatgatgagcattttttcatgtgtctgttggctgcataaatgtcttcttttgagaagtgtctgttcatatcctttgcccattttttgatggggttgttttttcttgtaaatttgtttaagttctttgtagattctggatattagccctttgcaggctgtaaattctaagcagcaggaagtaggtgtgagtagaagtggaggcagaaagcagccggttctgtttccaactgcattctcctttcctgtgcccctgtgtcatcaccatggaacgcctttcccgatgctacttccaacaggaggcagagggtgggagaattcaggttggaaggcttatccctaggaaagagggtgccgacagacaaggctccttggaagcctgacaaatcaaatttaccatttattgagcacctactatgtgacaggaacatgacacgcatgatttcatttaatcttcacaaccagcccaaagagcagctttctccctatttacagtcggagaaacggaggctctgagagattgtaagggacttgcccacggtcacccagctaggaaggaaagccagaaggccagcctaggtatcctggcggtcctggatcagagacactgctgtgaggcttcccggtgggaagaaggaaagtcatgcatcgatattcatcaccgagtgagagtgagagttcagccctgtcccaggcacctctgggcgggagggtggagaatccgaaagaaagaggcccgtccctggtcctcaaggtcgtgccaacaggccaactaagccatgtcccaaattgagagcgggttaaggtgggggcgtggggacgccctgacgcaacagggcttcggagaagggagcgctgggggctgcaatgccagaggattccttgaggagaaggggctggtggggcgggtaggggctggccgggagcaggaccgggaggaactggaccctctggactggggagtgcggggtagatgaaggcagaggagatggaggttctgcagtgtgaggcaggcggacagggaagcctgcatccagctgagagaccttgagcaaccacgtcctcctctgagctccgcgtttgccgtgtgcaaagtgaaggggtaggccgaccccgcagggcccttcttgcgctcctctgcggtgtgtgg

SEQ ID NO: 2390 - DNA, 800 bp, Homo sapiens
  misc_feature (1)..(800): DMR17:48032801
aagcacttggagcccacctgtgcgggcagcaatggagagtttcagaggcctgggctggagactgactgcggtgtgacattagagggaacttccatgtgtctgggctgggaaactggagttctccactgggagacattgagtgtatccttctctagttatgtttaagaaggacaaagcctcccttgaagatgaagtgattacttcattcctggttcccaaggaaactaaggggcatcgaagatacacattgtcccagaaagaacccttctggctgccctcctctaccccatggagcctaaaagaaggggtccaatggtgagcctccaggtcccagcctcaagcccagattccaaataacaacatttccccatagacagacccttcttactgccccaacctcctgaattcacctcattctcgtaggatgagcccaccacgtataggaagaggtcaatgctgttcttgtagacgatggtcatacccccaaaaaatgcaatctcacctagaagtggagggagctttcagtcctggccaccttgcctggtcctagcctagcccctcctcctcatgtatgactctgtgactctcctatttccttctcccctttctggagaacccttggaaagaccagcactagggacactaccatcaggcagccccgtgtccttccccttatctgctactctatttctagggactgcctcaggccaaggagtcaacaagcccagttgttgacccgtttacctcctgcccacgctcccaccctgtgcagcaccttgggaccagatccaggttgggac

SEQ ID NO: 2391 - DNA, 100 bp, Homo sapiens
  misc_feature (1)..(100): DMR17:50084301
gatttggatgataaattggtagattcttttaggagacgaagttttcagtatctattaaaatttaaagtgcccatttccttagatccagtacatgagaata

SEQ ID NO: 2392 - DNA, 2100 bp, Homo sapiens
  misc_feature (1)..(2100): DMR17:50187301
attggggagcagagaggccaaagctagatcagattgtttgttcaggattcttcctctctttgcccactccctgtccctgaacccttctccagagaggcaaagggtgcctgggtccctggcaagggtccccgaggtgagcctgggcttggggctcaggaagaggagagagaaggcatgacttactcggggaccagcaggaccagaggctccagagggaccttgttcaccaggagagccctgaaggacagataaaaaaggcagttcaggcccagtgagcgtcaaatgtagcctgagggcctggctggagagacaagggcagtgtgggcaacccatgccccttcattattctggaaatctagcccgagggtgtccataggcagagacctctcccataatccctctctgtgtacccctcaccctctcagaagctacttggacatgcccacaaatcttcagaccccagtccccactagggaggggaaagaatgactatccagagggggaaactgaggcgaagctccccctcctatcccacagcacagcatggggactggggaggggctgagcatacttacaggagggccagggggaccctggaggccagagaagccacggtgaccctttatgcctctgtcgccctgttcgcctgtctcacccttgtcaccacgggggccttggggtccctagaagagagaaagggacaaactgtcaggcggaagttccattggcatcgagtggggcactgtctgcatctgtagagttctaaaggcatgggggacacagcagggtacttacggcggggccacgggcgccaacagggccgacaggaccggcgggaccagcaggaccctggggagagcaaggaaagcatgagctcttggccagggaaggctgaggctggggctgcaggatgaggcctcccctctgctggatctctctctcctcagctgcttcccactgtggccatctctcccaactcccagggaaacctccccactgcaatcttcacgggagctggggccaactcatgggagaggcggtcctgtctgggagaggggacttggggctgagctttaactcagttttttggattaaggccctgacatcttgcaggatctcctttcctccccctgcctgggtgaagtccgacacccatccccaggcctctaaggaggcctgaagagtccctggcctgaccaggtacagggaactggagcccagctacttacagtctcaccacgatcaccactcttgccagcagggccaacggggccaggggcaccaggagcaccaggagcaccagggggtccagcggggccggtctcaccacggtcaccctggcggggagagcaggggaatatgggtcagccccgggtgaagggccaggatggggcagggaagcagcagacaaggctgtggtcatggagtgttgccatcttaccttggcgccaggagaaccgtctcgtccaggggaaccttcggcaccaggagccccctgcagagagagagagagagaagtgagagtcagccggggaagagggcttaggcaaggccacaatggccatgctgagggtactggcatgggggctggggactgctcacctcacgtccagattcaccagggggtccagccaatccaggggggcccatgggaccagggggaccacgttcaccacttgctccagagggaccttgtttgccaggttcaccctaagggagaagaaagagtcaggccagagatagggtctgggaggacccttgagtccgctggagtcatctctaccaaatctgttctccttggctccgccccactccaagtcctgtgatggtttttctcagggccccccaaggtgaggggggcacttacagaggggccaggaagaccagggaagcctctctctcctctctgaccaggcaggccgaccacaccacgctgtccagcaataccttgaggcccgggagtaccaggagcaccctttgggaggcaaacaggggtgaggtgccagagagcagcacagggacccctccccagctctgcacacctccggagctgcagagatctgagctggcacttacagcaggaccatcagcaccagggga

SEQ ID NO: 2393 - DNA, 1400 bp, Homo sapiens
  misc_feature (1)..(1400): DMR17:50257701
gctgggggctcactctcccctccctccatgcactgcaggggcaggcagtgggacaggcagtcgagctggatttgtttctcattcgctcttggctcctctggtggaaaaatcgaagcgctccccctggtactgctgaggcggagagggtgagcgtggctgggaggctgtcctggcagggaagtccaggggcaggcggggcctggccggggagaggctgccccctgctcacaacccccttcccagccctcttacttcgacgtggctctctaggcccagtgggaagtcctgcctcagctgaagtggaggggccgggccagggaggaggtcggactgggcttgggttcagcctcaggctcgtagcaccctccttccctgggcctgtctctagagcagtctcccaagggtgatttaaaatcccccgagggtcttccaaggaagtgctgtcaagctgcagcaggagggggccgagtcagacctgggacaggctttctcagcattcagactttgcctaagtgggaggtgagctgtgtactaggaggggagggttccacaggcaactgctggatatttcctgaacatccagggacatgagaagccttttctgtacatcatcccatgtggccctcacagacaccccaaggtcagtattagccatcccatttacaaaaatttttttaacacacacggttttgctctgttgcccaggctccagtgcagcggcgcagtcataactgaaggcaccctctaactcctaggctcaagcaatcctcctgcctcagcctcccaagtacctaagactacaggcacaagccaccacacctaactcatttattttttttgaggaagggcctcattatgttgtccaggctagtttcaaattcctggcctcaagtgatccacccacctcggcctcccaaagtgctgggattacaggggtgagccaccatgcctggccccatcccattttacaggtgagggacttgaggctccatgaagtcaggtgccccactcaaggggctacacagcctctacgtggcagggctgggatttgaacccagttgtgtctggctctttcccaaacactggaaaaggcaggcctttttcccctccaccccagggcccgggagcccctgagcagctcctgggtggggctgccccacagggagacagccttgggggaacccaggaggtctttgggctgtggcctgtctctgtggcacagtggggtgcctcgggagatctcccctccacctaccctcctcttgtggagttggacccacccccaccccattttttcagagggccctcaccccagccctctccatcccggtggaaagaggagcccaacctctttccctctggaatccgctgcctcggctctccgatggagagaccatctg

SEQ ID NO: 2394 - DNA, 500 bp, Homo sapiens
  misc_feature (1)..(500): DMR17:52255201
tagattccagacattgtatggaaagcattgtgaaaatccctgtcctgttctgttccgttctgattaccggtgcatgcagcccccagtcctataccctctgcttgctcaatcaatcacgaccccctcacgtggacccccttaagagttgtaagccccttaaaagggacaggaattgctcactcagggagctctgttgttggagacgtgagtcttgccaaagctcccggccgaataaagtccttccttctttaactcagtgtctgaggggttttgtctgcggcttgttctgctacaaccctaggctttgaatatgcaagtgcaggacgccatgatgttctacacatgtggggatatgtggtggcggccatgttgccaggcgcacatgtggggacaagaagaagatgaggggaatcgctatgtttgggtggacccagtctctaatggccagcatttgcatattaaagcttgccagcggggctttaagagtcagggcttttctg

SEQ ID NO: 2395 - DNA, 3500 bp, Homo sapiens
  misc_feature (1)..(3500): DMR17:55247301
tttcagatagagatatgttttaggaagaaaaaccaggttgatatgatagcatgactgccatgaaccagtggatcaaggaaacttcactgagctgaaccctgagtgacttgaaaaagcctttcatccaaagatcctcaacccctctttctctgtcacactccatatccaccccacagaaaatcctgcttaggtgtttgcgttttaaatttgtgttaatactattattgttgtgtgtgtgctgagggcatctgaaagtacatttcaaaatatatcttgaatcagaccacttatcatctcagctgctacaccctagaccaggccgctttattcatcagcttctcttcctgcttccatgcttgtgcctaccctccacagtgcactttatatccaacagtcacaaaatttctgacaaataaattgtatcacgtgcacaaatccttataatggtttcctatggcagaggagttattttctagcagaaaccatttattccttcttcctttagtaaccaaattaccccgttttagctaggcacatttcccagcttcccttgcagctaattttgaccatgtgaccatattctggccaatggaatatgagtagaaatgaggtgaacaatttccaggttgtgccctcaagaggaaaaggattgtcctctcttcctttctctcagttcttttggctggaatatggacccacgtggtggcaagctgccctctgctgtgtagatgacaaaccctgggggatggtggaaaaacaagaaatgtggctcctgatactgtggaaaccctcgggctgcttacccttagattgttacatgtcagaggaatgaacttctgtattatttaaatcatctaagctctttagggacatgaacaaagatgatgtctgccacttctgaatcatgcccttaaaagaaaagattgccttgcctttccctgtctctgctgtgtgggatgcaaacacaatggcagcagggggcagccatcttagtttcagaaatggaagcaccatcttgaggagagcagagcaaccctgcaatcccaggctgcctatctctggacagttatatgagaaagaaacaaacttctaacctgttggaacccctctactttccaagtctctgttacagcatcttagattctacccaactggcgtcttttacttaaaattaagtgaaatctgaagttcttaacatgaagaagggtatgcctatctcatgggaggtgaacagctatcacagtatctgcaagaaagtaaatactaaaagtatatcactttccttcatctccctgcacttcactccgtacatcattttaatgcctggaaccctaaaatcagtgtaaccaagttttaatgagaagctaaatacctgtaattagaaaaaattgttcttaggagaatagcatcactacataagtatgtcagaagatacctcactatatttttgacatgacaaaggttccaggtttttgggaaagtggggcattattgattttatgccttacaactgtcatcgttttacatccaatctatgccttaatcttctcactcttctcagagtgcctacaggaatgaattcattagacattcaagaggagaagcttgatgtgttagcacagcatcgtgataccagcgcttttcttagacagttaaagcctgagaatgtcaacccactgctagggcattaattaaattgggcaacgatcagagtcatgattaggacattcgtggaatagcgaggggacgcctcatctcgcccagcccccagcggctgctgccacaacagggaacaaaaggaaccaactgggctttcattaaacaccaaggatgagatatgcactttatatatattgtttcctccatttcctgcaaggttcctataaaatggtcattacgttccccattttagtgatgagacaattgaggcttgggagacttggctatttgcctaagaatgctgaaccaggcagttataaagccagattcttttccatgtctgcatgtgttaaagctcatgctccttctctcccccttcctcattccttccccactccccaattccagcctctgaaaatataacaaagagaggtgagctctagtttgggaatcaggagatggcaattccaattccacctctgctcatggcgttaggcactcagggcttcagtctcctcatctgatgtgaaccttcagactcttgcaggaagcaggacgtggaatctgcagctggtaaggcgtcacctaaacggcttcgtaatcagcatattagactgactcctctgctcccactccttaaatctacacacatcctctggggcacagcttccttgcattccccaagaaaaccaagaattaactgcttcgttcattacttttttttttttttttgagacagagtctcactctgtcacccaggctggagtgcagtggcacgatctcggctcactgcaacctctgcctcctgggttcaagcgattctcttgcctcagcttcccaagtagctgggactaaaggcgcctgccaccacgcctggctaatttttttgtatttttagtagagacgggatttcatcatgttagccaggatggtctcgatctcctgatttcatgatccgcccaccttggcctcccaaagtgctgggattacaggcgtaagccaccgcgcctgggcccattcattacatttttattaaagacctcctaggttccttatattgtgtctgggttacactgataagacaaaacctgtgatccctgacctcatggagtttacagttaagtaggaggccaaaggtcaaaagcaaacagatgaagaaacagttactttaaaaagcatgcagaaataaacgaataaggctttgagaaaaagagtaacactactttagagaaggcagctacttcagaaggtgatgattaggctgagctctaaaggatgagaaggaagtagctgctttgggaaaagtggccgatatggttggatatttatttgtcccctccaaatctcatgttgaaatgtgatccccagtgctggaggtggggcctggtgggaggtgttagaatcatgggggcggatccctcatgaatggcttggaactgtttttgctataatcagtaagttcttactctatgagttcacaggagatctggttgtttaaaagagcctggcaaccccacccccctacccgcctctctcttgcttcctttctttccatgagatatactggctccccctttgcctttcaccataattgtaagctccctgaggccttcactagaaatagatcctggcaccacacttcctgcacagcctgcagagctgcaagctaaaacaaacctcttttctttataaattacacagtctcaggtattcctttatagcagtacaaaagtggactaacacagtggcagaaagagcttgaggcagagggaacagcatatgtaaaggccctgagactggaaggaacttgacagctttgagaaactgaggcctgagctagt

SEQ ID NO: 2396 - DNA, 700 bp, Homo sapiens
  misc_feature (1)..(700): DMR17:55365601
agtttgctgatcacttggtaggttctccgtggccgagtggtagaggttaggaaggaggtatggaacaggcttagttagataagcttttttcaaaaacagcacagcatacctggtcatttggtaaataatataacatttgttaacgagatacatttatatgtatataaaataatctccttcaactccttaataaaatagctacagagactctcatgggcctctgattttatttttggcatttttaatggtttcctttgttcttttatacgtcttgggccctcgttggtggaatttgtggcttcgattctgttcagcccaccttgaaaacaaaccattaataaatacatttgggcctccttttgtgcctcgcagaaacaaacaaacaaaatgtctatttcattagcacaccaggatctggggaagggtgaattctctggaaagaaaagtacaggaggactaggagagatgtcaggcatgtcccacaaattcaatttattcttctttccagaccacatctaaatcaaagcagctgtacttgataagcctctctggttaagatgctgaaagtgatattcagattaaaggtaatgtgaggaagactttctgtctcaggtggagaagggttttgttcgggaaaaaacagcaggcaaatcaaagaaagtactgaggctcccaaagaaaatgagaacagaagagggtg

SEQ ID NO: 2397 - DNA, 1300 bp, Homo sapiens
  misc_feature (1)..(1300): DMR17:55491101
gcctgatgtggtggtgctgtagtttcagctactcgggagaccgaagtgggaggattacttgagcctgggaggttgaggctgcagtgagccatgattgcaccattgcactttcgcttaggtgacagagcaagactctgtctcctcaccaaaaaaaaaaaaaaaaaaaaaagggcggtcagaaaaaaaatcttcaaatattaattaaaaaaagaaaataatcacacaaatgctactagaggtcactttgaggagttaatatcatcattatcttctctttcttttccttcgctccattttttaagtttgccttaacaaatgtgtattaattttagaaagagaaacaaccccactagggcagctgctgctccaaattcattctctccctctttctttttactggaaccctgattttgttggaaatggcaatgtaactaacaaaaatctatacctttcagtcttccttgtagatagaagtaaacatttaattaagttctagctaatgaaatataagcatacattgctggttgggcctctcagctaactaaatgggcttgtgcctgtttgcctattccctctttctcccctcctggcctcaaactcagacgtaaagtttggaactgcagtggccagcctttaatgagaagacaacctcaaagatgaagtaaagctgatagaacagaaataaaggtgcctgcaatattagtggcatgttggagccactgcatctggctcagccacttttcttcaacatcagagtgaaagaaagagagcaaactaggcggggcggggtggctcacacctgtattcccagcacttccggaggccgaggtgggggaatcacgaggtcagtagatcgagaccatcctggttaacacagtgaaacctcatctctactaaaaacacaaaaaattagctgggcgtggtggcaggcacctgtagtcccagctactcgggaggctgaggcaggagaatggcgtgaaccagggaggcagagcttgcagtgagctgagatgctgtcactgcactccagcctgggcaacagagtgagaaaccatctcaaaaaaaaaaagaaaaaattaaaataaagagagcaaactcctcttgatattgatatttcttttttcttttcttttctttctttctttttttttttttttttttgagacagagtcttattctgtcaccaggctggattgcaatggcgcgaccttggctcactgcaacctctgcctaccaggttcaagcaattcccctgcctcagcctcctgagtagctgggactacaggcttgcgccaccaag

SEQ ID NO: 2398 - DNA, 200 bp, Homo sapiens
  misc_feature (1)..(200): DMR17:56613801
gttaaatatcatctctatgcctcagttttctcatttgtgaaaggaaagaaataataatgtccagttcatgggtataagactctttacctcactttcagtttcttcaactaaaaaaatgagaaaataacagtaattctactatgccagactagaggcaaggggtagaccctacttaatctttttttttttttttttttttt

SEQ ID NO: 2399 - DNA, 600 bp, Homo sapiens
  misc_feature (1)..(600): DMR17:56647701
tggcataattggtggaggattatttgtttgaacttgcaaaatggatttctgaaatgtttgagctggtgctagaagtgttttcaaagtgcctgtatactcaccttaaacacacacattattaagggatttcatttgacatttaacaattttgtatattaatattgccctccttcccctaaatggcctaatctgtctaaatccacagcatcaaaagtcattacacagaaagaacaagatgttgccagagccactatggcccagcattgaatttgcgtgagctgagatgattcagggagatttatatcctgttatttcctgaactcagagcaaaacctcacaggttcaagattttgaaaagcatttgtctgagcaatctcacttcatcactttgaaagggatggtgtctctgccatctgcttaagcagcaatgccttcatgaaaaggaaaaaaatctccctctcctctctctctctctctctctctctctccagctaagtatgtgaacactagggtgaattccaaggcctatggccactgggaaaacaggatctttactcaatcttccttcccctggaaaattttcttttacttcttccctgg

SEQ ID NO: 2400 - DNA, 2000 bp, Homo sapiens
  misc_feature (1)..(2000): DMR17:56659701
catgtttggtcaacttaatgcctttttattgctgcacagctctccacagtatggaggtaccataatttatgtaatgacttccccattggtagacatatatagtgttttgaaactgtaatgaacatgcttggaatgcccctttgtgtacacaagccagtatttctctaggatggatacctgaaaaggaactatctgcttcaaaggatttgcatatttttagtttcaatagaaactgccaaattgctaaagaaagaagccataccaacttatacttgcatcaacaatatataggttctgatcttttttttgttaagaaatgttgatgacttatagattgaagaattttatattaacagacgtgcaatattggcttattatgaggttgcctcggcacttgcctgattgcagagaaggatgatcctttattgcctgccagtaggtttcaccatggtgttcattagccacaggccctggcccctcccaggaagacctctttcaatattgacagggggggattttttgttcctttagtgagcagtgacctctagctgttgtgcactgcctttttgagagtcacaatcccccggccagaccacccagaattgtaggcgtaatagcagtggtacgttaggaccaggggaagacgagggaagagctcaccttggggatgccaaaaattcaattatcaagatagatatgtaggatcaaatgcagtatttttgaaaatcaaaattaatgcaaaaagtccacaattttaatacaaaatttcaaatagacaggattggtattagtgattttttcagtggcctcaggctccagtaggattctgcaatagtccagaacaacagtcatctgtcattttaagcagatctgggagactcgtagacagacagacagacacacacacacacacacacacacacacacacacacttcttaaaatccctgcttgcctgtgtggccttggggaaattgctgaacctctctgagactcagtttcattatttgtgagttgtcaaggagttttcaataagcatcccccaccacctgtactagtgcttgtgctattgttaggcaccaatgcaaccctactggctgctggttcttctatgatccttgagcctggtttggcctcttacctatttcctggtgaccaagtgacccctttatagactggagattgttaataggagggaatgaatatttactgggactttttttaaactacactgtgggatgggtacttccatgcattatctcagttaatctgcatagcaacccttcagatatatagatgagaaaactcaagttcagagaagttaaatgacttgccctcagtcacagagcaagccagtggctgagcggggctctggaaccagatcttgtatatgtaagtatatagtctaacgtttacttctctctgggctgtgtcagtagaagcaagagaaaagagcctgctacatctgaatacagacctcaagggcaaatgctccctcccaactgtgtatccgaattaaaaacagcaagttttgttcctgactcagcccaaacctactaccttcagaggtgcttgtttctcttgtccaaaccccaggatgcctgtgatttcctctcctaaagcagatgaccgttggcccagcctctcctcactgcctcccacctccccaaccccacaccactcactccacccagatgacacccccttatccctcctgacatcaaggtggacagtaaaacaacacagttccatttaccttcaccctagcccgcccccggctcagtcaccccactctctgggcctttctgccaagctctccaggcagccacatgcacaagagaaggctgagggtgggccaggctgtgcagaatgagggttttcagaagcgctcttggctcctgcacttagaacctttggagacctctggaggttcagcagctacgtgctcctctctgcttggcccaaaggggtgaaggccacctggccatgccaggccgggcca

SEQ ID NO: 2401 - DNA, 200 bp, Homo sapiens
  misc_feature (1)..(200): DMR17:57466401
tgtatgggaggcggcagtccattgttgcccaagactgtgcgatttcaaacagacacgggcttttaaaatattccagacagatattgaaaatgtcagcagcaggtttttcccacttacttcttgcccagctcttttttcctctctccctccccctgccacccaccccaccataaaatataatcaaaaagctggtaaataat

SEQ ID NO: 2402 - DNA, 1800 bp, Homo sapiens
  misc_feature (1)..(1800): DMR17:58826301
tctcaaaaaaaaaaaaaaaaagaaaagaaagaaagcggctttgatgttttatattatgaaagaaatttagctggacagatccagctgttgcatttataaatagctacagatatctacagcaataaagggtttattcaggttgttatggcaactaaaattcagcagaacttcaaagataaactatattgaagcaagaggtacattaactgtacatttaatcaaattatacaataaaattgttgcttaatatatcattttagatagcaagaaattagtttaacatatcaatgtaacttactatttttaatgtacaaatattttgtttttactcttttattttttttagatggaacctggctctgtcgcccaggctagagtgcagtgccacgatcttggctcactgcaacctctgcctcccaggttcaagcgatttttctgcctcaccctcctttgtagctgggaatacaggtgcatgccacctcacctggctaattttttttttgtatttttagtagagacggggtttcactgtgttagccaggatggtctcgatcccctgaccttgtgatccgccctcctcagcctcccaaagtgctgggattacaggtgtgatgtacaaaaattttgttcctaatttatctgtatgggttttatatacttttaaggagctttacttataggaatgatggatcatgctgacccatttaaaactctctttctcggtcttctttgtaataagttgcatgcttatttagatctgctggctagggttgagggtacatttctgagtcagtggaatatataaaagcctgcattcagctttaagtccatgatcttttttttttttttttttttgagacagagtcttgctctgtcacccaggctggagtgcaatgccacgatcttggtttactgcaatctccgcctcctgggttcaagcgattctcctgccgcagcctcccaagtagctgtgattataggtgcccgccaccatgcccagctaattttttgtatttttagtagagacagggtttcgccatgttggccgggctggtctcctgacctctggtgatcacctgccttggcctcccaaagtgctgggattacaggcatgagccaccacaccaagtgctgggattacaagcatgagccactacacctggccaaaatccatgatcttataccaatgttttatccaacttaactacctggttataatcttttaagccatttgaatatgtagatttattcagatattctgttacagtgggtctaggagtgggacatgagaacctataaatttaaaaaataattggccagggctgggcgcggtggcttatgcctgtaatcccagcactttgggaggccgaggagggcggatcacgaggtcaggagatcgagaccatcctggctaacatggtgaaaccctgtctctactaaaaatacaaaaaattagccaggcgtggtggcgcgcgcctgtagtcccagctacttgggaggctgaggcaggagaatggcgtgaacccgggaggcggagcttgcagtgagccaagatcgtgccagtgcactccaacctgggcgacagagcgagactccatctcaaaaaaaaaaaataataataataataataataattggccaggcaaggtggctcacgcctgtaaccccagcactttgggaggttgaggtgggcagatcacccgaggtcaggagttcgagaccagcttggccaacatggtgaaaccccgtgtctactaaaaatacaaaaattagccaggcgtgatggcaggtgcctgtaat

SEQ ID NO: 2403 - DNA, 600 bp, Homo sapiens
  misc_feature (1)..(600): DMR17:59532201
tatttttagtggagatggggtttcaccgcgttagccaggatggtctcggtctcctggcctcgtgatccgcccgcctcggcctcccaaagtgctgggattacaggcgtgagccaccgcgcctggccgagagacagagtttcattcttgttgctcaggctggagtgcaatggcacggtttcagctcactgcaacctctgcctcctgagttcacgcgattctcctgcctcagcctcctaagtagctgggactacaggcgcccaccgccatgcctggctgatttttgtatttttagtagaaacgggatttcaccaagttggtcaggctcctgacctccggtgtgccacccgcctcagcctcccaaagtgctgcgattacaggtgtaagccaccacacccggccagttttgctttttaaaaaataacaacaacaacatacattatagtatctttagacactatatttattcataacttcttttgggtcttgtcctcacactagactatatagttttaaactgtaagctacaataggacagcaagcaggtttgtattacttggtgtttatccctaggaacaacttagcacagtacctggcaaacag

SEQ ID NO: 2404 - DNA, 400 bp, Homo sapiens
  misc_feature (1)..(400): DMR17:62183901
tgcttataaaaatagtggattcccggccaggcgcggtggctcacacctgtaatctcagcactttgggaggccgaggcgggtggatcacgaggttaggagttcgagaccagcctgaccgacatggtgaaaccccgtctctactaaaaatacaaaaattaggctgggcgcggtggctcacgcctgtaatcccagcactttgggaggctgaggcgggcggaacacgaggtcagaagattgagaccatcctagctaacacagtgaaaccccgtctctactaaaaatacgaaaaaattagccgggcgtgttggcaggcacctgtagtcccagctacttgggaggctgaggcaggagaatggcgtgaacccgggaggcggagcttgcagtgagccgagatcgcgcc

SEQ ID NO: 2405 - DNA, 2300 bp, Homo sapiens
  misc_feature (1)..(2300): DMR17:62581901
catcacttgggaattgttggctccttgaaagtttgttagagttgactcataaaaattcttgggcaggacagtctctgtggctcatgtctataatcccagcactctgggagccgaggcaggaggatcacttgagcacaggagtttgaaaccagcctgggcaacatagcaagaccatgcctctacaaagaaagaaaagaaaaatctcctgggagatgttgagttagtggaaaacatttggctgtgttttcaatttcttctacaactattgatatattcagattttctctcccttcttaagtcagttttggtaatttaatttttctaggaaatctatttcatttagatttttttttcttttttaatagagacagggtttcactgtgctgcctaagctggtctcaaactcctagcctgaagtgatcttcacccctcagtcttccaaagtgctaggattacagccaccatgcttggcctagattttttaaaaatattttccacatcttagttacttctctgttcttgtaaaatttttatttttgtgtttcttgattgataggctagagattagtcagtgttgttattaatttttttcctaagaatcaacttttttgttgatcaaaactatttggttagttttctatttcattaatgtctgctttcattccttctttctgctttcttcatttttatttatgttcattcttaagtcaatgcttagtttattttctttgtaattttttattgtaaaaagatagatataaaatttaccatcttaaccatttttaagtgtgtagttcagtaaagtacattcacactttttgtgaaatagatctcaaactttctttcatcttccaaaactgaaactctgtagccattaaccaactttcctttccccctcctccttgtccttggaaccattttacattctgttactctgaatttgactatgtttagatttcttacagaagtggactcatactacgtctttttataatcagcttattttacttagcataatgtcctcaaggttcatctgtgctatagcatgtgacaagattgccttcctttttaagatcacttaatattttattgtatgtaccacattttgtttatcctcctctgtcgatggacacttgggttgcttccatctctcgcctaccgtgtatagtgctgttgtttttgtttttgttttgtttgtttgtttgttttgagacagagtcttgctctgtcgcccaggctggagtgcagtggtgcaatctcggctcactgcaacctccatctccccagttcaagtgattctgctgcctcagcctcttccagtagctaggattacaggtgtgcaccaccaagcccagctattttttttgtatttttagtagagacgggatttcactgtgttggccaggctagtctcgaactcctgacctcaaatgatccgcccatctctgcctcccaaagtgctgggattataggcacaagccaccgcacccagcctatagtgctgttttgaatttgggtgtccagttatctctgtgagactctgctttcaattcttttggatgtatacctagaagtgtatgtaattttaaatcatcaaaattggttcttggtgcctcccagttacttttagtaatttgatcatcctattttttcctaatgtatttcttcaaacattttatttctttttctcttgagacagagtctcactctgtcgtccaggctgtagtgtaatggtgtgatcttggctcactgctgcaacctctgcctcccgggttcaagtgattctcctggctcagcctcccgagtagctgggattacaggcgcccgaccccacacccggataatttttgtattttttggtagagacggggttttactatgttggctaggctggtttcaaattcctgacctcgtgatctgcctgcctcggcctcccaaagtgctgggattacaggtgtgagccaccacgctgagccccacacattttatttctgaaatctaaatacttcttacagtgatgtgtgcatttaatgtagtttttcttttgctgttctccactctccacaatcctttcttaagtcagtggtaggtcacagtgtcttggatttagaatagaagtacagtgtagtagttagagaaaattatgcttgaaatagcattggtgctcttataaattgggtggtatttaatgtttttttcttttgtggtttttttttttttttttttttttttgatacggaatctcgctctgtcgcccaggctggagagtgcagtggtgctatctcggctcactgcaacct

SEQ ID NO: 2406 - DNA, 1000 bp, Homo sapiens
  misc_feature (1)..(1000): DMR17:62799701
gtgccactgcactccagcctgggcaacaagagcacaactctgtctcaaaaaaaaaaaaaaaagaataaaacctaaatgccaagctatgttctgtgagacccagtgtgacacttccgtactttccctgggttcatgtgttccagcccctctggctaactttggtttcatccgggctggttcctgcctcagggcctttgcactgtctctttccttccgattgggaagctctggggggatctttcccataattcacctcaacagtcaagtgtcacttcctcaaagagacctcccctgcttctaagggatcaccgcctccaaccccttaacctgttttattttcctcattgtatttatcaataactgaaactaccttacacatttctacttgtgtaagtccttccccctcttaatcttagaataagaattccaggagaacagaggctttgttcagcacatagtaggcaccaaatagatattggctgaatgaatgaatgaaaaggcagtgttaagagcccaatggagattagaaaataaaacggcaacggctcaaagccacacagttgtgtgattttcttcaacaaggaccataaaactataagattgattttttcctacatgcctgttctggagacaatttcaaacaggagccgggtggcagaggcatctttgtgaaaagcagttagactcccagggcgaccagtgtggatgtttatgttcttatttattttgcagaaatgccctcgattttctcgtcttcttatacgtgggttggcacgttgtgggaggaaattgctgactctgtttccagccctaaagctaagccgtattatacaggtgaaatcaggttactgagacaggtctggtttccttggtgacctgggagctttagttatatttgaaattgctaagaaggggaaaaacctgataacagcagttctgtgttttcctcagggaaggagcgcttttcaatcctcagcccaggctgaggacgtgccttcct

SEQ ID NO: 2407 - DNA, 500 bp, Homo sapiens
  misc_feature (1)..(500): DMR17:63185801
tgtaaatcctgtatagatcttttgtctattttttaattggattgtctttcttgttgatttgtagtagttatctcactctatggcttgcccttttaccttcttaatggtgtctttggtgaaaagattgactttgccaatcttttttcttaatggttgttgccttttgggcctttgtaagaaatatttacctagttctaggtcataaagttacactaaaaggtcgttttccagaagacttattgcttcactttttacctttgggtctataatctatatgaaacttattcttttaaggacaggatttacttttccatatggatatcatattgatctgtcaccaatacttgaaaacactctcatgttactgaaacactgcagtgaaacttttgttctgaatcaggtgattatatatagagagagatctgtttttggatttttaaactctgttccattgaccacctttttatctatgcttttgtctagctgtgtcttaattactt

SEQ ID NO: 2408 - DNA, 300 bp, Homo sapiens
  misc_feature (1)..(300): DMR17:63414701
aaagactgggatccctgtggagttgtaactatagagaaggaatagagtggataaagatcagctaaaggggtgggagatgccgcctgcatctttctggtctcagcttatagattttcagatacaaagtggaagaaaagttcaaggtcgctgtggccagatctctaaattggtcatagatttacttcctcttggataatccctcctgcaacatcagatggaatcacaaactctaaacttcacttttctactgccaccctactccatgcctttccaaaaatggggaacactgattggtattat

SEQ ID NO: 2409 - DNA, 200 bp, Homo sapiens
  misc_feature (1)..(200): DMR17:63800801
aaccaaatcacttacatttgactttagaattaaaacatttttttcaagtaattgtacttgttttccagaaccaatatttctttcttttctttctttctctttctttcttttctttccttccttcctttctttcttttctttccttccttcctttctttctttttcttttcttctttctttctccctttctctttcctttt

SEQ ID NO: 2410 - DNA, 300 bp, Homo sapiens
  misc_feature (1)..(300): DMR17:63815401
aaaccaatctgtggttcctgtgaaaattcctcccttagcgtagtgctggctgaaaattaagcaaaagttcccccttcccacttaatttcctctttgtcctcgttctcttcttctgttcttttctccctcccttgacttaaccttgaattttgttcaatgcagaatgcctggtttcggaaatctcgattcaaaggagggaaaggaaaaaagctgaacattggtggaggaggcctaggctacagggagcggcctggcctgggctctgagaacatggtgagtctagactactacagtagtgcc

SEQ ID NO: 2411 - DNA, 800 bp, Homo sapiens
  misc_feature (1)..(800): DMR17:64136201
agacagagtctttctgtcgcccaggctagagtgcagtggcgtgatcttggctcactgcaacctctgcctcccgggttcaagcaattctctgcctcagcctcccaggtagctgggattacaggtgcctgccaccaagcctggctaattttttgtatttttagtagaggcggggtttcaccatcttggccaggctggtcttgaactcctgacgtcatgatccacccgcctcagcctcccaaagtgctgggattacaggcatgagccaccgcgcccggccttttatataccaaattttagagcagaaaggcactttagccataatgtagtcagcttcatttcgcagatgacttcatctttgacctctacatggataactacaatgcattcattcaacaaaaatcactgaaggcttccaagtaccagggattagtgccataaggaaatattagagaattttcaggttgatacaggacatgcacagaaataaccaaggtacaagactgatggtgaaggcctggtgtggtggctcacgcttgtgatcccagcactttgggaggccgaggcaggcagatcacctgaggtcaggagtttgagaccagcctggccaacatggtgaaaccctgtctctgttaaaaatacaaaaattagctgggtgtggtggcagatgcctttagtaccagctacttgggagactgaggcaggagaatcacttgaaccccaggaggcagaggttgcagttagctgagatcatgccattgcactccagcctgggcgacaagagcaaaacttcatctaaaaat

SEQ ID NO: 2412 - DNA, 200 bp, Homo sapiens
  misc_feature (1)..(200): DMR17:64235901
aaacaagctatatcagatgagctttcctatgaaattccacctgtagcaaatgttcatccatattactgttacctggtgactttgttgatgactctgtcttcccctttacactggccaccttgggcacctgcaacacagatttttccctatgtaaactcctccttgaaatagcaatctaaatagcttaaggtacagccggc

SEQ ID NO: 2413 - DNA, 900 bp, Homo sapiens
  misc_feature (1)..(900): DMR17:65412301
atttttatgttaaagagatggcatctttctttaaaccttatgaaccaacctctcctaggttccaactttccttctgtagcttcctcccctctctcagccttcatagaattgaagagagttagggccttcctctggattaggcttcagctgaagagaattttgtggctggtttgatcttttatccagaccacttaaactttctctatatcagcaataaggctgtctcactttcttgtcatttgtgtgttcactggagtagcacttttagtttccctcaagaacttttcatttgcattcgcaacttggctaactggttggcacaacaggcctagctttcaacctatgtcagctttcaacatgtcttcttcattaagtttaattatttctagcttttgatttaaagtaagagatgtgtgactattcctttcatatggacacttaggggtcattgtagggttattaactggcctaatttcattatagctgtttctcagggaacagggaggtccaaggagagggagagaggtggaagaacagctggtcagtggaggtcagaacacacacatttattaagtttgccgtcttatatgggtccagttcatggcaccccaaaacaattacgatagaaacatcaaagattaccaatcactgattacagatcataacagataaataatgaaaaagtttaaaaattgcaagaattagcaaaatgtgacacagggacatgaagtgagcatatgctgttagaaaagtggtgctggctgggcgtggtggctcacacctgtaatcccagcactttgggaggccaaggcgggcagatcacctgaggtcaggagttcaagaccagcctggccaacatggcgaaaccctgtgtctactaaaaatacaaaaaattatcca

SEQ ID NO: 2414 - DNA, 900 bp, Homo sapiens
  misc_feature (1)..(900): DMR17:68151901
tctagtggaacaagtatttcatctgcctgatgatctgcagcctgatctaggtctgcagtttgaaccttacttttgaggtgaggaagctgaactagggtctagttctgatcccagtccagcattggaaccacctctggtgccttttcttcggagtcagcttgtcatttagatcctggtgtgcagccgagaactgctctggaccccggggggcagctctccagctgaatccgtgtccaggaacagaaccaaattttcagtcgattcctggggcggggctgacatctgggaggaagcagacgacgcgacgccacgtaatcaaagccctccaggtcagcagagggagtagacgcatggggagattcccatgggagatgggaggagcaggaagactagggctcagtaggccccgggggttagaggtcagctggagcgggtctttgacccactccagaggctgagcctcctggactagtagccacaatagttgccacgtgaggaagggccttgggccccagagacacagctgggacatgacacacgctggcgctgtgcagtgagtgggagccattctaacagcctggagaggctcgcacccgcgataagcgtgcgccccgcccagtctttatgacatctttatgccacctttattaggcttgggtccagatctgctccatgtctccatggcaatcttatgtcacaatcccgcccaagctcccctttcccccctcccctctcctccccttagcgaggtaggatttgggccgcagacccgggtggtcccaggactcctggggcctgttgtggtggggtggggtgggggcacggcagagcttcccaaggaagtcacgggaccccgcctcaggatattcagaagctctagtccagttctggcagcctgaa

SEQ ID NO: 2415 - DNA, 700 bp, Homo sapiens
  misc_feature (1)..(700): DMR17:69912401
tattatgtaacattctaggttttacaatttttttatttttattttattttattattattatttttttgagacagagtcttgctctgttgcccaggctggagtgcagtcgtgagatcttggctcactgcaacctctgactccagggttaaagattttctccctcctaggccttccgagcagctcggattacaggtgcccaccaccatgccctgttagtttttgtatttttagtagagacagagtttcaccatgaaagccaggctggtctcaaactcctgacctcaggtgatccacccgcctcggcctcccaaagtgttgggattacaggcgtgagccaccgcactcggccacaaaattttttgaaaagagctaagcagcgtatctttctggtacaaatggtcctactaatattattattctgttggtagccaagtaggaaaattctataagtgccagatatttgagcttataaagattccaacagaatcttccttcaccccaccaccagccccacacattagtctggagatatttatatttgctgccaaatatctgccccaaatcattctgtattgctgacattttgtcagattaatagatcccgagtgatatgaatatgttgattttgtggcagactgccaaagaatcctttttatagacaaaaatggatatgataaattatgtttcttgaggtcccgat

SEQ ID NO: 2416 - DNA, 800 bp, Homo sapiens
  misc_feature (1)..(800): DMR17:70183001
cattaaggaatttgactttagaaaattctattcaactcaaccaaaaatttgttaagcgattataatgtaatactgggcactcagagttttctttatggacttggtctccaatcagtcacaacttagaaaatgggtggtatggttatatatttattttgtcttaaaaactaagaaaagtaactgggttttagatataaaaagtttgtatagaacagtaactaccaattactgagtacttaggatctattaggcactgtacagacacactgttcttttcctccatgtgtggacatcttcatttggaagattaaatatctttgcagggaggtcactgtggattcaagtgtttttgaaacaccctattgggaatcgttttcagtgcacctcatttaaatattttatttgtgacaaaattttttataactttttggttaaggttaaattctatgtttagaaaaatccagaactcaatcagaaccacatttaagtgacaaagttggataattaagatcgcaaatatcatgtcctacaaaacaatcaatgagtgactataaagaacatgtaattagtgagatggtttggttgtttaattgtcaatggttctgatttggctcaaatgacccaggaggctttacaaaatatgctgcaccgggagagtggacttggattaagtaagcaaccttctgctatgataacttggaaggacatctcaaatgtctataaataatcttacctggcttaaaaaactcctttctctctctctctctctctctctctctctcgctttctttccctctcac

SEQ ID NO: 2417 - DNA, 300 bp, Homo sapiens
  misc_feature (1)..(300): DMR17:70298401
aaatcttttttaactcaggaataattaaggagtaaatatctacacaaatgaggctggaatatgaaatgtttgtgtactgagtagtgccataattggagacacaaaaaaataaggaaaataatgtgaaagtattgcaattgaagttctctgagcaagaaaatggccaagttagaagcttgataagaaagggaataggccaggcgtggtggctcatgtctgtaatccagcactttgggaggccaaggcgggtggatcacgaggtcaggagttcaagaacagcctggtcaagatggtgaaacc

SEQ ID NO: 2418 - DNA, 600 bp, Homo sapiens
  misc_feature (1)..(600): DMR17:70460001
tcagacgatcaaattactctgagctacgggaggacattcaaaccaaaggcaaagaagttgaaaactttgaaaaaaatttagaagaatgtataactagaataaccaatacagagaagtgcttaaaggagctgatggagctgaaaaccaaggctcgagaactacgtgaagaatgcagaagcctcaggagccgatgcgatcaactggaagaaagggtatcagcaatggaagatgaaatgaatgaaatgaagcgagaagggaagtttagagaaaaaagaataaaaagaaatgagcaaagcctccaagaaatatgggactatgtgaaaagaccaaatctacgtctgattggtgtacctgaaagtgatgtggagaatggaaccaagttggaaaacactctgcaggatattatccaggagaacttccccaatctagcaaggcaggccaacgttcagattcaggaaatacagagaacgccacaaagatactcctcgagaagagcaactccaagacacataattgtcagattcaccaaagttgaaatgaaggaaaaaatgttaagggcagccagagagaaaggtcgggttaccctcaaaggaaagccca

SEQ ID NO: 2419 - DNA, 1700 bp, Homo sapiens
  misc_feature (1)..(1700): DMR17:71240401
ttatctgtcttttaaagcagtaatgtttaggattacctagggatgtaagtaataagtagtccctgtcaatcaggaggaaaaaaacttcagtcttttttattcccaaatggagccccaaaatgactggccataagcaaaatggcactgtgtgcttctttgttccccaccctcaactccctccttccattctgacccttctcctctactccacaccatcaaaaacctgctcccatatctcatattcacactacaaaatacatgaaagtttttatgcaaagttcaccagggtgggcagagaggatggggagaggcatagttgaatcttatcttggataaaatcaaattaaaaacactgaacactagtggggagatttgtagcaactacccatattaagaatgtttgggcatggagagaggttcaagaaaatcttgtagagtttcattgagttagactgggcaaaatagggatgaaggcattgtttggcagacagcaaacaaaggaggaagcagaagatttcaaacctaattttgcaaatgatttggggaagagatatgtcagtctgcactcactatagtatttcccccacggtttattttataatccactgagagcagattgtttttaaaatatctgttatatactagttaccttttaaatgtttaccctttgaaggactgtgatgctgttcctaatttacatttatgattattctgtcatcatttatgtaaaattgactaagagggtgttttcaggaatctactggaaaccatgagcaatgtaaattgccaaggtgccagaaatgtaggagggctaattctatgaccttaccattagtactttatatctgctctatttggacaaacttatggaaggaaatatactttacttttccatagaagaaattaaacactcgtgcattaatatgtcacatacaggagttcaatgcctgcactgtagttccaccacatattaacgggtgattccactctctgagcaaagccgactgcagacagagttttcttcctctcttgtcaaacatcccctacctgaggcaccaggatcttgttcagcacttgagtccagaaacagcaaattcaatctagctgtggcaggccgagggtaaattggaatgccaactctagaccgggattcaaaaccacgagcctctggaaataaagcttggacttggagaaatgacaccaacctcaagccaagaaatctcacccagtttgtttaacagttttcagtgcacagtgaatatagataaccactaacattactcctgttttagtttaaagcatatccgactaagaacttaatgtaaggtgccataagaatgaaaacatcacactcttctctgggttctcagtctttgagatattttggcggtcacctgattgcaaaatgtagcagcaactttcttttctggtgtgctaagatagttttatctcatttttctacctgtcaagtgctagtttcatgcattagctggagctacaataggaaaataaaatggacactgcagatattctataaatatatctaagtctatgtctttctatctacttatctctatcttttggtctacctattgtcggtctgtttgtctatctgttcatgtatgtatgtatgtatgtatgtatgtatctatctatctatctatctatctatctatctatctatcaattaatcatctatc

SEQ ID NO: 2420 - DNA, 200 bp, Homo sapiens
  misc_feature (1)..(200): DMR17:71245601
aaaaattagccaggcacgatagcgggcacctgtagtcccagctactcaggaggctgaggcaggagaatcgcttgaacccaggaggtggaggttgcagtgagctgagatcgcactactggactccagcatggacaagagcgagactcatccagaaaaaaaaaaaggagacagtcaatagcatcatctgtataaaatcttaa

SEQ ID NO: 2421 - DNA, 700 bp, Homo sapiens
  misc_feature (1)..(700): DMR17:71304401
aagagaatccacaaaacctttgaagaactggatcatcgctgcaggctccctgagataccgaaaaactgagtctgcctgctttcacgaaggggaggctcatggtctgggcaagttctcagccctggtcactggctgcctggaaacagacttggtgctgttgcaggggcacggtgggagtgagaccagcctttaggaccaagggagtggggtgaggcctgtgactgctagcttttccacacttccctggaaacctgtatgactcagcagaggcagccataatccccctgggaatacaactccattggactgagaacccatcccccacagcagccacagcaagctctgcccaaggagaggctgagctcagccatgcttatgtctgcccctatctggtggtctttctcttccacctttatccgcctccccccacctctaccccatagctgaagacaaaagagttctatggccctgcctaccacctgagaaacctgaatacttaaccaggtggccatagggcaagtttacatcctacctataggaccacggctgatgcattcttgaaagcgccacctcctggttggagaccaaccaacacaaaaccagcacactgaacagaaacacaaccaaggaccctcacacagtccacttcactcccctcctacctccaccagaggaggtgctggtatccatggctgaaaga

SEQ ID NO: 2422 - DNA, 900 bp, Homo sapiens
  misc_feature (1)..(900): DMR17:72697201
gcctcctgagtagttgggactacaagtgcacgccaccacttctggctaatttttgtattttttgtagagatggggtttcgccatgttgcccaggctggtctcgaactcctgaactcaagtgatctgcccaccttggcctcccaaagtgctgggattacaggtgtgagccaccaagcccctggcacatatttcattttattgcaaaaactttcctgattatccccagatgaaggtgtctatcttcaatttgctcccagtaagatcagggacagagggtggaggctctggggagaggctctgtctcacccaatctcccacaatctccatcagtgcccatcaccaccacaccatctcaacgaagcccaaaatccaagtgttccaaacaatgagctcgctatgccacagtgcaaatccctgggttgctctgaaaatcagatcaccagtggcagctaagtcctccctctgagaaacactgagtcatatcccctggcagggaccatgacctctgctccattctgtccccctcagagcagaaccccccacccccgccccgaccctcatgatcctaggggctccataaatgctcctatgtctgatttgactgatacactcgccacgtggatgggctcaggaaggatgagataccacacaatactcctgccaatgccccctggctgtaaccccagggctgggcaatttatgaagtagacaggagccacacaagctccgttatcacagtaaaagccttgtccaggaacaatgttgcctttcaaattgttttccgccttggacagtggatttataaactgaactggtggctaggaacagaagcccatctgcaaagactaaacgccttgttctacgcgggcctggtttagtattatcctgataagataaaca

SEQ ID NO: 2423 - DNA, 1100 bp, Homo sapiens
  misc_feature (1)..(1100): DMR17:72776601
ctttgcatggaaaaaaaaaaaaaaaaaaacagaagacaggctgttggtaatccagctgctagacagaggaagagagagactagcgcttactgggacatttctagcggcattatatatatacccgtggtctggtctgatttcatcctcacaacagcattccaaggatcttatccactccactttacaggtagaaaaatagtggtttggacagctgaagtcacctgccaaaagtagcagctggtccacagtaaatcgaatccccacccctcaccaagtcccctcctgccttaaccggagcagtcactgggggccctagctttgaagctgactttcgcagttcatggctaaatgacctctctcaacttcacttttttcatctcataagagggggccatatgatctgcctaccttcctggggggccgtgaggattggctgaggtcaagggtgggcctgcttcgtaaactgcactgttatcattgggatctgggacggagcctgaataaacgtattcacactcgggctttagtgtttaataagacttaaaacaacaataacaaatccctatcgaactatgtgcattttaagaggggacaaagctctaaaccaaaaaaagggcattatgatcatagcttcaggtctcatttagcctgccaggtcaaaggggactggggcaggaagggagttacctatttaataggaactcttctcagaaaattgtaaatcatgccagggaatagtatactgggttgaccagtatccccccaaaatccatgtctactcaaacctcagaacatgaccttatttggaaataaggtctttacagatgtaaacagtcaagatgaggtcatactggattagggtgggtccccaatccaatgacgagtgtccctataaaaaacgaaaaccgaaacccagagacatacagatacagaggggagaagtacatgtgaagatggaggtggcatgggaacgatgcatctacaagctaagttacaccaagaattattggtaactctaggaaactaggagaggccaagaaaggtcttctctagagccttcaggagaagcatggccctgtggacaccctgacttcaggctt

SEQ ID NO: 2424 - DNA, 200 bp, Homo sapiens
  misc_feature (1)..(200): DMR17:72794601
agtcctcccttcttttcctgcatctcattagcaccttacttgtgcagggctttgtgtgtgctatgcccttagcctgggacactcgcctccctcttcccatctcttcacctggccaatttattctcttccttcaagtcccagggtgactttcatttcctccagcaagtgcctcctctctgcccctctgaattaattatctt

SEQ ID NO: 2425 - DNA, 1400 bp, Homo sapiens
  misc_feature (1)..(1400): DMR17:73906701
tttgacgccttggctccccttcaggtgcctctcgcatcactctagcaggctcgcctaggcatgttctcatagtgggagcataggtgtgtggtggaaatgcacaagcactttttcaagttgtgcttgagtcaaagttacgaccatggaccaaagcaacctcctggggagtgtgggaggtcatgacttcagggcctggatagagggaagccattcgcaaggccacaaacgcaatcagtctcctacaaagaccagctcaggacctgcagcagtcagaagggattggaggtgtcccctccccaaagctttggaagccttgctgccagagtccaagttctgagtcggtgctggtcactgcagcctggggataaagaagcccagtctttccgctgcaggaatggcccccacgggaaggcaagccatctccagctgtgattagttggagatcagcagtatccagccagcctcccaatctcacctggggtcccggcgacggggggcctgaggatgaaaggatggtgggtagtgggcaagggaggagggaggagttaaataaaacaccagagcaagccccagaggtgtgaatttgcccttggtcttcatctaacagggctgtctgcctcccctccttttttctcccatgtcctccacccacacctgcctctgaatgtggtgagccaggaactgattgcacagaaacttctcatttttagttttacctcaggtggttgcaaatctccttcctgctcagagatggggactgagcctgccccttggcatcctggtcctgctgcctgccccctccgtggccccagccccagcccccagcctggaccccatgctcctcctcagcactctgtcactgacagcgccttcgcaggctacagggactctggtgtggagtgatagattctgccttttcctgctttcaggaaatattgccattcgcttcgcatttatcctgcccctcatcaccacatggaggccgaggctgaggcgggctcgtagtcatctattatctgcctctgttggaggaggaggacaggcttgcaccgggagtgccaggaggtgggctggggctggggagatggagctctcattcaataagccacaaatatttattgggagtcggctgtgcacatagaagtgcaggtactgaaaggagagagaaaaacggtgccacagggccaggggacacaccctcctaccagactcacaatggggcaagagaggtgggacattagctgttagaggctgaaaccgcaaacacccctgtggaagtaacagtacaagagtgctagagggtgatttgaaatcaggtataaaaagctttccatatgcatgccctttgatccagcagttccacatctagaaattattctaaatgtgtacagagatgcgtg

SEQ ID NO: 2426 - DNA, 3000 bp, Homo sapiens
  misc_feature (1)..(3000): DMR17:75024001
gggagaccttgaagcatggcaatttcctgttactatcatccagcagagaagacagaatacagctaattggccacttttccttttaagttactaaaggaatttaagcaagccattagtcaatacggaccgaactctccttttgtgcaaactctattaaaaaatatggctcttgataatagattaataccatgtggctgggatactttgacaaaatctgttctcaccctatctcagtatttgcagtttaaaacctggtgggctgatgaagctcaaactcaggcaggggaaaacatacaagcacagccacctgtgcctgtttcctttgaacagttaatgggagttggccctaactggggttgattagagaaatcaagcagtaatggaggatgctgccattgttcagctgcgctttgtgtgcttatgggcatgggaaaggataaatgttacaggcgaaaaacatccttctgtcagttctatccgtcaaggacctaaagaaccatatattgattttattgctcagctccaagaggctgtgtataaagccattactaataaaacggctcaggatgttgtaatacagcttcctgcatacgaaaatgctagtgcagtgtcaaactgctattagacccctgagagggacggctcatttagctaaatatattaaggattgcgatggcattggaggtaacttacataaggcaactcttttagctcaggctatggctggattaagagtaggaaagaatataccccatttctcaggcccttgctttaattgtggtcaatttggacacccaagaaaggaatgtagaaaaggaaatcaaaaggcaaacattactaccatcagtcaacagaaaagtcccggtatatgtctccagtgtaagaaaagcaaacactgggcaagtcagtgtcattctaaatttaacaaggatggacaacctctttcaggaaacgggaagagaggcctgcctcgagcccctcaacaaaccaaggcacagccatgcccttacaaacgtgcaacaattgtcccccacttcagcaggcagtgctgccatagacctctacagcacaattaccatctccttaggagaggtgaagccgactgggcttctgggtcgggtggggacttgggtaacttttctgtctacctaaggattgtaaacacatcaatcagcactctgtctagctaaaggtttgtaaacgcaccaatcagcactgtgtaaaaacggaccaatcacctctctgtaaaatggaccaatcagcaggatgtgggtggggccaagtaagggaataaaagctggccacccaagccgcagtggcaatccgctggggtgctgtttcatgctgtggaagctttgttcttttgctcttcacaataaattttgctgctgcttcctctgggtctgcactacctttatgagctgtaacactcaccgtgagggtctgtggcttcattcctgaagtcagcaaggccacgaacccatcaggaggaaccaacaactccagacgtgcccctttaagagctgtaacactgcaaagttctgtggcttcactcctgaagtcaagcgagaccacaaacccaccggaaggaagaaactccagacacatctgaacatctgaaggaacaaactccggacacaccatctttaagagctataacacttaccatgagggtccgcggcttcattcttgaagtcagcaagaccaagaacccaccagaaggaaccaattccggacacacttcctggggagccaccaaagaaggtccccatgggagttaggagacccttatcctcaggaacagtcggtctattacttggaaggtctagtctaaatttaaaaggtgtgccaggtgtggtagctcacgactgtaatcccagcactctgggaggccaaggcaggcagatcatgaggtcaggagattgagaccatcctggctaatatggtgaaacctcgtctctactaaaaaatacaaaaactaatagccaggtgttgtggtgggcgcctataatcccagctacttgggaggttgagacaagagaatggcatgaacccgggaggcggagcttgcagtgagccaagatcgtgccactgcactccagcctgagtgacagagtgagactccatctcaacaaaaaaaattaaaaggtgttactatacatacaggaataattgactctgattatactggagaaattcaatttgttattagttccttgactctgtggtctgcctccccaggagaaagaattgctgatttgttgctgttaccttacataaaactaggcagcagcacagtgaaaagaacaggaggctttggtaatagtaatccagcaggaaaggctgtatattgggttaatcaagtgtctgacgaaagacctgtttgcacagtaaccattcagggaaaagattttgaaggactagcagatactggagctgatgtctctattattgctataaagcaatggcccctgcactggcctaaacaaaaggcatccattggtattgctggagtaggagctgcctcagaagtttttcagagttctttgattttaccatctcaagggcctgatggtcaggaagggacaattcagcctatcattatacctattcctgtcaatttatggggtagagacttattgcaataatgggatgctgaaatatctattcctgtggatcaatatagtaataatagtagacaaataatgaaaaatgtgggatatcacccaggaaaagaactaggaaaaaataaaaatggccaatcagaacctttagaaggacaaacagatcggaccggattggggtgtcatttttaggagcagccattgttgagcctccagttcccattcttgtgtggctaactgccaaaccagtttgggtggagcaatggctgctgaaacaggaaaaactggaggctttaaaagaactggtgcaggaacaattgcaaaagggacatatagagcctactttctccccttagaattatcctgtatttgtcat

SEQ ID NO: 2427 - DNA, 700 bp, Homo sapiens
  misc_feature (1)..(700): DMR17:76573201
acatagtcatgggcatcgatgttgggaccctggcgggacccattcagaatgcctccgttgcccaccacggcacaccggatacactttggaggggtgtccctgggcggggcaaacagcttggcactctctgagccgttcagaaggctcagggtggaggcgatgactgtgggtgcagatggggagcagccatgaggagggctggcatcgggggcacctggggccttccctaggctggttctggtgccccatctcccctgaggcctgaccctagcccctcccaagaagcacagagggtgggaggggaaggagatgtctgtggggggagaattgaaaagctgacagtggaagagggggcttggcggccttcacttgtcttaagaacttgaataccttatcttcttaagactggtgctagagaagtgagctcagggcttaaaaaagactgggctgggcacggtggctcacacctgtaataccagaactttggaagggtgaggtgggtgaatcacttgaggccaggagttcgagaccagcctgggcaacatggtgaaaccatgtctctattaaaaatacaaaaattagccaggcgtggtggtgcgtgcctaatcccagctacttgggaggctgaggcacaagaatcacttgaacccgggaggcggaggttgtagtgagctgagattgtgccattgcactccagcct

SEQ ID NO: 2428 - DNA, 1000 bp, Homo sapiens
  misc_feature (1)..(1000): DMR17:77032401
ggaaagggtctcaaaaataaaatgttagctcactgcagcctccacctcctgggctcaagtgatcctcctgcctcagcctcctgagtagctgggacaacaggcgtacaccaccaagcccagctatttttttgtgtgtattatttgtagagatggggtttcgctatattgcctaggctgatctcaaagtcctgggctcaagtgaccctcccacctcagcctctcaagtagctgggactacaggtgcacaccaccacacccagctaatttttttttcagtagagacaaggtttcaccgtgttgctcaggctgatcttgaactcctggcctcaagtgatccacccacctcggcctcctaaagtgctgggattacaggcgtgagccactgcacccagtcagtgaaagtgattttggatttctgatctccagaactgtaagagaataactgttgtctaagccaccatgtttgtgtaagtagtgacagcagccgtcggaaaccatttcagcacattttgtgtgttattctgaggatgcagtgtgtgcattcgctggctcatggtgggcctgtttgccccggtccctcctcacctgctgcagctgtggtcgggtctgacctctgcaggctatttctaggcccagactgcctccagtccatgggaggcactggtgggagactggagggtaggcattctggggagttcatgctctccctctctgtcttgggctacatctctgcatggctgtgaccccacccatggctctccacaagtgaccccagtcctgaggtcctggtagctccacatcttccctttgtccctccatccctcagcgtggtagcagcttcccatccctgcccccttatcatccatgccatcattaagtgttaagcaagtgatacctgttaccaccttcagtggaagagccctattgagtggcgggtcctgccaccaggagcagcagtcctgggacgtcagccccctgcgtggcttgtgggtgaggacgg

SEQ ID NO: 2429 - DNA, 2100 bp, Homo sapiens
  misc_feature (1)..(2100): DMR17:78121801
agacacaccaggaggcttgaaccaggacagagggccagttccccatgccccacctgccctttcatctgctgagggccctccctccaggcgcagagaggacccagtccccctgccgagaggcccctgtgcctgggctggcgttcactcccgaggcctgcctcaacccctctccacccacctccccagccctgcccgctggggcaggggccttgctcagaggtcctttcctgttccctgtggatgtgggtggcccccagtgaccagaagcccccctacacggaatggctcatgacaggtcacagctctgagctccttgaagcacagaaccccagaaaggcagagaatgttccacgaggcccggctctgcagcctcctggccccgcaacctctacgagggcctcggcctctatgcctcagtctcctctctgaggcacacagaaggtgacagtcctcacccactggcctcctatggccaccaaccaagctaacgccagccagggagcatgtgccagctggggcctgaggcctcagggctggctcccgggtgcccacggggccatggcgctactacgcgctagcagacaacagaggcagcccctaactgatgggtgtgtgccagagaaaaactcagggcctgcccgtcactgcaagcagaagaccacgcctgcccagcgccccgagttcagctcacggacagctggccctccctctagaccatggttctggtcacatggtcctaagtggacccagggccaggcctgcagggagctgggcaggccagcttggtgctccggggccactcaccttcagccgggtgcgaatattgtcctgctggaggcgggaggcccgcttctgcgtcaccttgtagtcccaggagcagaagacggtgatggcgtggatgccagaggtgctgcccacccggtagctctccccgaaagagtgagccatgctggggagaagcagacacagacatggcaaccaacaagctgacgggcagaggccaaggggagaaggcagaccggatgctctgggcagccagaccccaccacccactcaggagccatctgggccctgactgggcctcctgccacacccctgccccaccaccagccctctacaccagtctcatccaacatagcacccaccagccacatctgcctagaagagggggcagggctgcattcaccgcggacttggctggctgcctcccagcgagacatggaccagaagatgctgggctcacctcagggcctttgcactgctggtcccaatgaccaaaacatcttccctgcttccttatccatccccactcttatctaaccttcccctctcagggcaagtgccgcctcccctgggaagcagcctgactccttccccagtgctcccataacactggggaaacaccactaagcctcatggattgtcccagcccattcagtggtccatcttctcccagagacagcaagcccccctaggacatttaccatcctgccctgagctgagcacagagaatgtttgtggaatacgtagatgcatgggtggatgggtggatggatggatgaataaatgtgtgggtggatgggtggatggatgaacggatgggtggatgaatgggtggatagataaggaggtggatggatgtgcgaatggatggatgcgtggatgaatgagtgggtggatggatgaatgggtggatgggtgggttaaactgagtggatggatgggtgggtagatggatgaatgggtggatgggtgggtggatgggtgaatgggtgaatgtgtgaatggatggatgggtgggtgaatggatgaatgggtggatgggtggatgggtgggtgaactgattgggtgaatgggtgggtagatggatgggtgggtgaattgagtgggtggatgggggggtgaattgagtgggtagataggtaggtggatggctgaatgggtaaatgggtgggtgaattgagtgggtggatgggtgggtggatggatgaatgggtggatgggtgggtaggtagatggatgggtagatgggtgggtaagtggatagttggataggtgagtggatgagagcagacaggtagatggacagaaggaagaaa

SEQ ID NO: 2430 - DNA, 2500 bp, Homo sapiens
  misc_feature (1)..(2500): DMR17:78627701
atattttgaataaagggggaaaaggtaagaagatactacacaatgagggctttagaagaatagtaagaatttttgaggctgcgtgcaatggctcacacctgtaatcccagcactttgggaggtcgaggtggtggattattcgagcttgggcaacatagcaagacctcatctctactaaaggttttttaaaaaattagccgggtatggtagcacatacctgtagtcccagctactgaggaggctgaggtgggaggatcacctaagcctgtgagttcgaggctgcagtgagccaagatcatgccactgaactccagcctgggcaacagaacgagagcctgtctcaaaaaaaaaaaaaaaaaaaaaaaaaaaaaaagtaagaatttttggaattcaaatgtgaatttttaatctttttaattttacgaatcatagagaaaagaatctgaatgaagatctggaaatacaatttccagtctctggctttgcttggcctgatcatttccaaacaaaccttaagacttgctgttttgcccaaattcttccctagtctaatcgtcaggcagatgtgaccgtggggaactggctgtccccgcatcagcagcaggcagcggcattacctgaggtatttccttcctggcagttgatcatagaagttcatggttccatctgtgctaaagaattcatccccagatccgaaaaccaagagctctggtttggtctgataatgtgtcatatggtcttcagaagaaagcagaacaatcggtcattccaaaggtcatttggaagaaccaaggtcattcagcttctagttgtgagtggaggctgcagagggaccctaggaggcgtgggaccctagaggaaccccagggatgagtgggtgtggaaggggcgccctggtcagtcaatagtcaacacaagagcactattctagtcacaagtgggcccaggaggcgttgagactggtggccgggggcgcctgctctcctgcccaccaaccaggtgacctgttcaagccactgaacctgcctgggccttagtcccacagcgctggggtggaggcaacaggcgtcgctgactctgggttattggggtggcggggttagatcaactgccaacctggcgaacgccctgggaccacgcatggctggtaaggaactctagaggggatttttcatccttattattatgaccggcgcccctccatgctgagtgatgtgctgagactgtgcacgccaccctctgcccccttcatttcaaaaatgcagaacggaggctgcagggggccacctgcccagtgtgcacagctcatgaatgaccggatgaggtgacaccaccatctgtcaccccagggccaggcctctgtcctccccagaaacttgtcctcgcccactccacctgcaagtcctctaggggctgagcactacacaggaacacgtgcagattccagcacccagaggtccttcacacctagccacagggcctctggcagcctcggccatcctctctgcgtgcctgaggcggctgcgctgagcagtgggggacccaggaaaggtcacggctcccccagcacatctgacacacctcccgccgggccagctgctggcttcagcaagcagacgtccccttcctatggaaaagcccatgaaagctgatttgaaatatctgagcagctgtttgaaggacgtggatcagccctgttcagcggcctgagcggagagcggggccagaggtacaagcctgggacggcccgcaggctctgggagacacaagtcttctcagacttaggcctcatgggaccccaggggcctggtcagctgggttccccaagggctcacccacagagagcctccgttctcagtgtcgctgtggatgaccaacactaaaacccccaagcccagaccgcacctcgttcccgctcacctcggaatccctggagaaatcagacatcagccctttaaaagttccccagtgactttaacgtgcaacccaggtggggcgtcactaggccaggtgtcacccatgtgtgcccccaactggaggccctcagtgggcttgttcgagggcctccaggctggatgttcgccccagatggcccagatggcctattttgtgcattgtctggctgtgtggaaacagaacagcaccatagtgacatctagcccggatgtgggcatggcccaccgaccactgaccgcctacgtcgttcttccaccccgagcgcccgcatatcccgttccgttcacctcccactggggtcaacactcccttcacagcctccatcttccccggggcagtcccattgctttggagacttcaaaaaattgtactcacaaaaggggtcgacatgttctatcttctcctggaagcggggtgtgtccttgttcccagtgacattcagcgtgtgcagggcccgtacgcatgcactctggcctccaaagcacctgtcgttgtggagattccacagcaggcagggtggagatggtgagccgcagacatcaca

SEQ ID NO: 2431 - DNA, 2600 bp, Homo sapiens
  misc_feature (1)..(2600): DMR17:79420301
aaatctactgccatttttaaaaatacttgtttatctacaagtttctcagaacatatgtgcagcaccaagtcagggactcccaattagaacgcccccacccacgaagggagcatgggaggaaagtgtgagtcagcggccccagggctgctgggcggagtcctctgccagccagcctgctagagtcccctgggaccttctccctccacagccatgtccaggctctgtccagcacctaggtctgcccccatcccaacccaggagaaggggtccacattctcacaggggtctccatggcaccactgttagcaggcagggcaggcctaggggagggaagtgcacgggaaccgcttgcctcccagccactgctctgcagctgaagagctcggccacccgaggggagggtggaggaaagaggccttgctgtgaggaatctcacccctgccacaggagggtcaggcctctgccctcagcttctaggacaggatgtctaagcccctggaacggcttactgatgagtgtctttatttactcagggtcttcgtctagccaggaagtaacaatgtgatgtgggggctggtctggggtctcacgggatcagctgacctctagaaagcctggagactcaggtcagccatgtacacctcccaagccgccatgatgaagctggtgaagactcgggcatggaggcccaggggcttccctgctgagtgagcctcccctggtgggttgaggggcttccctactgggtgagcctccccaggtgggtcgagggccttccctgctgggtgagcctccccaggtgctgtcaaacatcagtgccaggaagatgacaccgtcctggcttcacagcagagggcaggatgctccgtgccctaacctacaggcctccatgccctaacctccgcggccgcttctctcagctggttccaccctgtgtcttttagctgtaatgaaccctgagcgtgagaaccatgactgctgggctccgaggtcctctagcaaacaaccgggcctgagagtggttctggaagcctctacgcttgaggctggtgtcagaagtggggctgcttgaagtggatggccccctcaatgtggaaggaggctgggcctggctgcctgccaagcctaggggcctctccagagcccacggaccacagccactggcaggacagcagctctcagcccctccccctgaagaaagcatgtggggagggacagggcccagggcctcacctggacaggaggcgaggctcaaatgacccatgctggcattgggtgacaggagggggccccagaagttgaggacacaaggaacatggacccctgaccagggcatgcgggaccccaggggcacaccgaacgcggtcaccataggaccaaacaagatgaccataggaccaagcaagatgacgcaggcccctggcaagcctgaggccggggcagcagccatgctctctcctcctgtggtggggaggtctccttgaggccttgggacaagggcagagagagagaaggggaaggaagtgatcaggtgccggaaggccccgtgagggtggcccacgaggctcatgggttccaggaacccacgccccaccccaagctgcccggtcctcagcaactggccccatgttccacaggctcagcagctcccaacagaattctaggtgctgcccggacgagatgaggagggggacttgccggctgctggcttccagcctcatggggtacagaggcacccagggaggggcagagaggggagaagagcattgaaggggctgagagaggcgggacttggagcctggggagaagggtgtgggccggggaggagaggagaggtcctgagaaggccctctgatgatagctgctctggagaggcagaagggagacagggaaacagggggagccatgtgcagacagcagttgggacgggcacgcggggagggctggcccccgacagcggcagcacagcctcgtcttcctggtaaatcatcctatggcctcgctggcaactgtgaccaagatgcccaacccccctccccacacattcaacccctccctccgtcctgtgctgccacagcacccccactgcctccctgtgcccggccctccactcccaggccggtgcctccaggaagcccagggggtcacctgcccgagccggctgctgccctctgtgtttcacccagggcttcccggcccaggctgcctcctctgtcctcccgctccctacacaccccttcatttgcggaagccgccaggcagacactcggtctgggcaaggcccagggtccagcagcctcaggctgggcggggccaggctgggcagatgctgggtcgtcaccccggcagtgctcctctctgcctgggcgcagtggcgggaacccggggtgcaccctggctcttctccatcaccacctgttagggtctaaattgtgccccctccccaacttcatatgttgcagccctgacccccctgtgtagctgcatttggaggtggagcctataagtaggttattaaggttcagtgaagtcacagggaccctcatcggatgggattgatgcccttacaggaagagacagcagggcgatatgcactctct

SEQ ID NO: 2432 - DNA, 1900 bp, Homo sapiens
  misc_feature (1)..(1900): DMR17:80373501
ccaaggtgagggcactcacctcagagcttctttaattaggcatcacttctaattgaatttcactcaaggaaagtagaacattcttgtggcctttgctttcagcgaattaaacgtagttcagcttgcaaggtgcgacctttttacctctggcaggcagagacaggcaagagcaagaactaggaatagaagaattgcagaagaggcttcaaggccaggctgggcacagtggctctcacctgtaattccagcactttgggaggccgaggcaggcggatcacttgtggtcaggagtttgtcaagaccagcctggccaacatggtgaaaccttgtctctacttcaaagaaaaaaaaaattagctggacatgatggtgggtgcttgtaatcccagctagtcgggaggctgaggcaggagaatcacttgaacccgggaggcagaggttgcagtgagccgagattgcaccactgcactccagcgcctgggcgatagagcgagactccgtctcaaaaaaaaaaaaaaaaaaaagaggcttcaaggcctctcagtggtcctttccagatacccagaaattaacaaattcttattgtccaggggatacaaaaatggtactaagaaccccggcactgtttgactaccacctggggtttagagttgacatgacttgagccacccggcctcaggtgtggtgcggtgcgccgcaaacggaggaagcaagcacctccccaggtagcgctgccgtcggcaggcattccctgcacttgcacctcttcgtctactgaggaggaagctccctgcgaagagggcaccagactgtcctgcctcaggccaggtcagggaatcccagcttggctgcctttaaacctcgaatgatcaaccacctggttcctgtacccgttcagacggttctttgcaagacattcctcccattgttcacccccaactaacctctgtattccaggggctgcggcaggaccacccaggccagatggataggtacctggtgtacggcgatgaatacaaggctctccgtgatgctgtggccaaagctgtcctcgagtgcaagccactgggcattaagactgctctgaaggtaggatgggcccgtggcttctctctgataccaggtggcatcccttggagcctgcatgttccctggtttatgtcaaatgatgcagggtgatggaccactgatgcagcccatcacgtgacactgtattggaagtcacgtgcccacagcctccagggcgcacctggctagtgtgcgtgaaccagtggctggaacaggacagctatgacagttgagctgggttgacagatttgctgtgtcttgctgatctgccaagtccatcagcagcgccttttgatttatgcccattacttcctttgagaccctgctggaaaacagtctaagaaagatgctgacacaactattaatagcaaaattcatacctagatgtattcataattcagatatgcatgtgtgtttaataaaaatacatatgttggtgtagtgtgggaagttaaaaaatataaagatgtttttagaatctaacctttaaattggtctggtcttgcttcctttttgagtccctgtgccaggaaaagaggaaatggaaaatcctctttctgctcagaagtttctaagaccagtgaaggagtcagaagaacagatggtgattccgttgcttctgtcattaagctggctgctaaatatgcgttgagtttaatctgagagtatttcaggaactttgtagcccaaaagttgctcgccagaagactgcccatgtggggcatgaccccaggtgtccaggcctggaaaaggctccttcccttttggtgggttgagggctgaggcatgtgaaaagtttcttttcacatgcaaacttcgtgggcctctggcc

SEQ ID NO: 2433 - DNA, 200 bp, Homo sapiens
  misc_feature (1)..(200): DMR17:80900901
gtctgcaggtccccacgcccacagcacctccctttccccctgggcatttggataccacatgggcatctccccttctgctggcgaaggctacagaaagttcacagctgtggagtttccaggtggctgaacttgctgaggctgctgtttgctgtgcgcgtgccatgcctgaggccctgggtgctgtccacaggcaagaggga

SEQ ID NO: 2434 - DNA, 2200 bp, Homo sapiens
  misc_feature (1)..(2200): DMR17:81299201
gtcagtttggccagtccggtgaatgaaatggaatctctttgtggctctaatttgttcttattacaaattaggtgaattatttattcatatttttattgtccatttttcttctgtgaaatgcttactcatttttgcttgttttcctatttagccgttctgaggaatttcggtgctcgataataaccaactctgtgtccttcgatgcgggtttgatgtctcctcattgctgtagtttttcattaaacaaattaccacaaactaagcagcttcaacaacacaaattcgttacgcatgggctctggaggtcagaagtccagcacagatcgaggtgtcggcaggctgcctgccttctggaagctccgggagacagctggcttcctgctctttggttgttggctgagtccagccccttagggtcgcaggaccaaggttcctgttttcttgccggctgccccctgaagctgtccccagcttctgaaggccttctgttccctggctcacagcccctttccctaacttccccatggagaggagccagtcctcctgtcccatctccggcccagctgaggaaggttttccaaccctaaggtttcgtgcgattagatggagcccatctggataatctgggatcatctgccatctcaaggtctaaccttaatcacatctgcaaagtcccttttgccaagtgaggtcacattcacgggttccggtatgaggggtgcacaccttagggggccgcaatgctgccggccaccgtcacgctgagattcaggccatgtgtccctgtcacagaagtgaagccttttggacactgcatcccatctgtggtgcacagtggccgtgggacccagggctcttgagtttcctgtcgcctgctgggctaggcttcaccgctgcagccacctcttctgtggacctggtgaatgctttgtggggatgggggtgtcttccacgctgagtatcctgggccttagtgagctttcggtcagcctccagcagtatgggctcagggttcctatcttattctgtgggtcaggacccctgactcactattgagatgctcagggtatcccaggctcggccttgtgggagccctatcggctggcccctgggtccttccgtgtgtccctgatgtgatcccagcattcttgcttcccggctccctgggatgttcttgtgcttttcctgcccaggctgggctcgccatttcccccaggagccctggtttctgggagagggaacctcctgagggagggggagttagcggccgagatctgggtgctgggtgtgcttgtggcgcctgggttccctctggacagagcaagaagagatgttgggggtgtgtgtgtatgatgtgtgtgtggtatgtgtggggtgtgttatgtctatggcgtgtgtgtatgatgtgtctgtggtatgtgtgggatgtgttatgtctgtggtgtgtgtgtatggtgcatgtgtctgtggttgtgtgcgtgtgtgtggcatttgtggggtatgtataatgtgtgtgtgtctatgtatagtgtgtgtggtgtgtatggccgtgtatgattgtgtggtgcgtgtgtgtgtttagtgtgtgtgtggatggtgtgtgtggcgcatgtgtgggtggatggtgtgttgcacgcgtgtgtgcgtgggtggatggtgtgttgcacacgtgtgtggtgcgtgtgtgggtggatggtgtgttacacacgtgtgtggtgggtgtgtggctgcgtggtgtttgcacgtatgtgtggtgcatgtgtgggtggatggtgtgttgcacgcatgtgtgtggtgcatgtgtgggtggatggtgtgttgcacacatgtgtgtggtgcatgtgtgggtggatggtgtgttgcatgcatgtgtgtggtgtgggtggatggtgtgttgcacgcgtgtgtgcgtgggtggatggtgtgttgcacgtgtgtgtggtgcgtgtgtgggtggatggtgtgttggacgcatgtgtgtgtgtttaccacacatccacctctagctctgtaactctgcatctggctacgtgcactgaggctttgcaccaacacctccaaatacctgtagaggtcccggcacggggctcctcctggtgctcccccttcctggtttgtaactccgtcgctcccacctccctcgggctcctgcacccaaccctgggctgcccccaaccgtgcccagcctaaatgctttggg

SEQ ID NO: 2435 - DNA, 800 bp, Homo sapiens
  misc_feature (1)..(800): DMR17:81985501
ctccaggttcgcatcgctttgcagctggacgatggctcgaggttgcaggactctttctgttcaggccagaccctctgggagcttctcagccattttccacagatcaggtgagcatcagtgggctgggggctcttccctaccctgtttgctggggaagctgctgtggttactgggtctggttcagagctggacacccaagctctgtgctggcctgtggtgcctcttggcactttgcagtcctttgtagaggaggggtgtgtgggctgccggttcatgagcagcagcctcggggatggctggtcacagctcatcgttctgagtttcctgggcccagcggcccagccttgcccacctagaagagcaggaatgtgcttctgtccttgtgggggcctggtgagcactaaggggagacgttcggtgctgggggcagggctccccatgcttgattcccctggatgggatcataaggtctcttttttttaagaggcagggtctcactatgttggtcacctaggctgctcttgaacccatgggctcaagaaattctcccatctcagcctcccaaagcgttgagattacaggtgtgagctcctgtgccccaccagaaaatcttcctaatagtaattggatggctgggcacagtggctgggcacagtggctgggcaaagtggcttgcactttggaaggccgaggctggcgaatcgcttgagctcatgagttcaagactagcctcggcaacatagtgaaaccccttctctacaaaaaatagaaatgttaggccaggcatagtgcatggtggt

SEQ ID NO: 2436 - DNA, 4300 bp, Homo sapiens
  misc_feature (1)..(4300): DMR17:82300901
agcccaactcccttccaggccaggaagcgctggcaggcggtctcccacccacgccccgtcccgccaccagagggcaggcagtccttctcggctggggccagcccggcgcagctggcatttctcctgcaggatgccatggcccaccgagctgggaggccacatgctggagccgcctgcgggcagtagaggcctcagaggcaggcccaacccgggtcagggcaggccggggctggcccagaagatttcagcagagaggaggggttccagatgggcctcgggggaggtgtgcagggcgtgtgtgaagaaagctgccccctgggactctctcttgcccccggacgtggagaagcctcaggccccacaaacccagatgtacccagaaaggaggtccgggtggcactgaggtgccaggctgatgggggaggtccgggtggcactgaggtgccaggctgatgggccgaggtggggaaagggccaggaggggtgagctgggcaggagggggaccactgaagtgcatccctggggaccccaggccacagtgccctggatggctgggtgggcagtcgggttcagcccagacaccagggagcagggccggagggcacagcagcgcaggctgagctgagggctctccctgggaggagggagaaggtgacgcgggctttctcatcagggtgttgagggcaggggcaggggtggctcatgatggtgggaaaggggcaggggccttggagccctgggttggtgtggagagagggcccaggcaggggtcccagcgtgcttgaaagccagccctggggtgcacacaatgtccttcctggcagctatggggacaatgtgactggccacttcgtccgtcttaaggccccccactgtgctgtctcaaggccccccgcatggagtttggtgaccaggaccagggggtgcatgtccttgctggggccccagagctggtcccggagatggcaggagtgcaggggcttctggggtggacccctgctctctggcccatggtcccctagcccggcaagtgacagccctcagcagggaggttggggcccacggagctgggagagcagcagggggcctgtgcagactagcccggtccccagccaccacccccaggtgtgggaaaggcaggcgcctgggggatctgaggtttcggtcctgccccgctgagggtgtgggaggaacggtagaggactctgagggtcaaggcggtctctcctgggagtgccagggagggcctgtatcctctcacatctgggtgagaagggggctaccccacacgccctgtactccctttgcagtcctctgtctcccccacagggaccccagtttctgggccccccctcactgctcttcctggacccctcttgtcttcaaggaggggttgggtggggctggctcgctgggaagctaagcagcagctggcactgggcctccgctgcaggtaggaagtggtgtctgcgctggtgggaacgcggtttacccgcccacacaggctgctcggccctttctccgagtgtgaggtgtgcttggggaggccggcggccgagtggccaggcccaaggccttaaagagaagtgggtctcttcggcttcccaggctgggactttgaagaccagaaaacgtgaaattaggacccgccacaaggagagggagttggaaaagcccaggtccctttgcagatcacccccttgtactgaggtttctgaagctcggggtgagggcggatgcagggagcggggcagcctggtcccagagcccggggtctcagccaggcaggatcggcagtgaccatctcctggtgccgccccgggacctggctgccagctgctgctcctgggagggagactggggagggtgaggggatgcagcccccgacctgagcaaaaccacttccatggggcttggggcccctccccagagaagccctcttccaagtcaccaccagcgtacggacccaggaggcctgaggcaggcggggcgtcctccgtctgggtgaccctctcccggcctgcattatggggctgggagcggctgggcccaaagctgaaggcggtctttcgggtgctgagcctttagcagggctgggaagttccatccttcatgacagaggccgtcaggggctgctggggtagaaacccaggcaggggtcttattaggacaggcagtcctgtcatggatggaggagtcccaggtagctagggcgcctgctggaggccccaggccaggggtgggcggtggtttggagccctgctccgggggtgaattctgtggcagaagagagacagaggcaggatgccgcctccgcgaccactgtgagaatcagggagctcagcccccagcggtcagccccggcccgagtctcagcttgagcttgctgagcagctgggggcgtgggtctggccggctccgcacctctacaccgcggctttccctccatggccacggatggccaggcactccagccttggagccaggccttctgctccagcctctgggagccatttcccaaatcccacagcagcccccagtctgtgggtaaggaaggaaaggggcagctgtgtggccagcacccacagcgtcctcaccctcccccggtttctggcatcttcctccgtggtctagggcggactttgatcttcaactcaggaagcaccaagagttcgtgcacaggacggcgcaggctgttgccccagaagctaggggaggggtacccactgtgtggtctcacggtgtggagcacctggggtaggcaggctgagcgtgggaacggccctggccatttgcggtggccctggcctctggtgcctgtgtccctgtgtcggggggcaccgcgtcctgtgggtctttgcaccgcactgagcccctcctccaccctgcacagcttctgaagagctcatccagctgtggccacaggccctggtggcgactccccacttctgtggggcaggggaggttgaggtctctccggaggggacctctccttctccatcattgttacctggggcaggcgagtgcccttcagacctcgctgtcctgaccggggccacctcctcctggctcaggcttggttttattcaaggagaggctgggtctccctggctccctgtgagcccaagaagattaaatgcattaaacaatggggtgaagctgatggcttgaacctgagggagaggcggatgtgctcggggggcacctgaggagccccaggcccaggggtgtctccaagcaggccagccacctgccacagcctggagaccgggaggctcgagggtcccggaggctgcccaccggatgcagggcagcttgagagtctcagcgggacagcagctcccggcccggcggccgcccatcagtcagcccaccccactgtccttcaccactccagcaagtggaggggctgagggggcccctggggctgggggtgggaaggagaaggagccctgggggagaggggcttgtcgggcgagagaaggggaggggagtggaggggaggcgaggaagggaggagagaggagcagatgcgacctggccctgtcacggggaggctagggcccctctacaaggctcccgcccttcttccagctgccctctgaggccctctggcctctgagcaccaagagccccaggctccccgcctccaggctgctgggttctggccgacccaccctggtgggagccgactcatgttctccctgctgactctgcgagcctggaggtggcccggccccatccatcccctcccctccccctgctccccacccctccgctccttgcccccttatctccttccctctccctcctcccttcctctcttccccatgtccaacgccagctcccgggccccactccagctgcccaggccacagtgattccctgtcctgtcttctgaggccattttcccaacagcattggctgaggcaggaggatcacttgagcccaggaggtggaggctgcagtgagctgtgatcgcgccactgcgctccagcccaggcaacagaaagagaccctgtctcaaaaaaaaaaaaaaaagaaaagaaaaagaaaaagaaaaagttgactgagtgtaaaagtcacttattctgaggaacaagaacctactcctggctccagctttgctcctaacctggcatttggttttgaggatgttactcaggcccggagctcccattgccactcaactgggcatcctcgtgcctggggaggcccagcactggctctagggaaaacgggacatgtggaaggctgggggctggaaattcctgccatggggctcgggggtggtctcag

SEQ ID NO: 2437 - DNA, 1500 bp, Homo sapiens
  misc_feature (1)..(1500): DMR17:82753501
gagtgcagtgcagtggtgcgatcttggctcactgcaacctcaacctctcaggttcaagctattctcctgtcttagcctcccgagtagctggggctacaggcgcgcgccaccacgcccggctaattttgtatttttagtagagggggtttcaccatgttggtcaggctggtctcaaactcctgacctcaagtggtcgcccgactcagcctcccaaagtgttgagattacaggtgtgagccactgcgctcggccccagtgggttctttctgcgggctgcccagatagagttgatttgtcagggcaggggagttgccatggagaagatttagttcacgcagagccggttgaaagggagactagactagaggtttttttttttttttttgaggcggagtctcactttgtcccccagggtggagtgcagtgatgagatctcagctcactgcaacctccacaacctccacctcccaggttcaagtgattctcctgcctcagcctcccgagtagctgggactacaggtgcgcgccaccacgcccacctaatttttcgtattattagtagtgacgggtttcatcgtgttagccaggatggtctcgatctcctgacctcgtgatccacccgcctcagcctcccaaagtgagccaccacgcccggctggagttttattattactcagatcagtctccctgagaatttgagggccagggttttttagaggtaatctgggggaaagggtgggggtggctgattggttaggggtatacaatcataggggagtcggaaatgatcctccgtgatgtgctgaatcgcgtctgcgtggggccccaggagcagtgggcgggtccaggtggagctatcatgggtccgtggatcctagtgtaggtgtcagacatggaaacaatctgaaaagatatctttaaaggccagtctcaggttctgcaatagtgacatggtctgcaggagtaactggggaactcgcatgtcttgtgatctcaagaataatggctggcaattaggttacgccttagcggaattcaggctcctctcctcctcctagcctggtggcctctcattaactttacaaaggcagttgagttttggggaagggctcttagcatttaaactataaattaaatgtctcccagaggtagcttggcagcttgaagactaaaggcatgagggggttgcctggatcagatctgccccattgccataatttcctcacagatcacttttgcaaaggcagttttgctgggaagcagtgggtgtgttcagatgtggaggtgggagctgccggattggacagaagcagtttcagctgctgagaggaggagaaagcggtggttcagggtctgggaggttgtgaagagctggcagctgtgtggaagggagcagtgcctggatatgtcaaccaaaaagtatctgagacgagtctcaatcagtttagaaggttaagggtgtgcccgtgaggcagcctcaggaggtcacatgtccccaag

SEQ ID NO: 2438 - DNA, 3000 bp, Homo sapiens
  misc_feature (1)..(3000): DMR17:82759601
gtgtgagccactgcacccagtctctactgaagttttagaaatatttagcttgtcaaactatcagtttctttgtgtttggcctttggtagtacggttagaaagtttatttttcctaatcagttatgtaagcctcatttattggatgatttagtggcctctcccctacttgaaatgccattttaaatctatattaaatattcaaatatattagcctttgcttttagattttttatcctgttccattgacctatctgtatgctcttttttctgggtcatttcgtttgtttgttttttttttttttttgagatggagtctcgctctgtcacccaggctggagtgcagtggcgtgttcttggcttactgcaacctccgcctcccaggttcaagagattctcctgcctcagcctcccgagtagcatgtgccaccacgcctggctaatttttgtatttttagtagagaacggttttcatcatgttggccaggatagtctcgaactcctgacctcaagcagtctgcccgccttggcctcccaaagtgctggaattagaggcgtgagccaccacgcctggcctgggtcattttgtttgatgttagtttatattttgcctggcatcctttcctcttattttcttgatggttttgtagcccgttcattaatgcggatgaactccggaattattttatcactctccaccctttggaattctattaaattcacaaattcatgtaggggagaagtctttctaagatttaattttcatgtctaagatcatggtattatgtctctaattattcacatcttttgtgttcctcagtgaaggttggtgattttctttagatgattcctggagacttttttttaggtttatttctaggtatgttttgtcttttattgctcttgtgaaactatttgttatgtgttctaactagttattgctgatgtctagtgaagatatgttttgtatactgtttttgtaaatggcaacactgtaatggaatatgtatgtgtaaacatacatttcttaacatctttatagggatataattacatactatagagttcactcttctaaatatacattttagtgttagtgtattagtgtattacagagttgtgtaactatcactaccacaatctaggcattttcatcatctgaagcaacccaactcccatcaacaattccttcccattctctgcttccgcagtaaccactcatctggctctgggtttgtgtgtattcagcattttgtgtgatggaatcatgcagtaggaggtcttttggcactggcttttttcacttagcatcatgtctatgaggttcactgtgtgatgaaatgtttacttcaatagtttttcagtctttttttttttttggagacaaagtcttgctctgtcacccaggctggagtgtaatggcgtgatcttggctcactgcaacctccttctcctgggttcaagcgattctcctgcctcagcctcctgagtagctgggattacaggcgccacctgtaaaattagcctggccaatttttgtattctgagtagagacagggtttcaccatgatggccaggcttgtcttgaactcctgacctcaggtgatccacctgcctcggcctcccaaagtgctgggattacaggcgtgagccaccgtgcccggccagttgtttcttctgggttttcttagcaggtaaatattatatggtttgtaaataatgctactctttatccacgattataaatttttattcttagaacattttattgagttttaattttattgagtttaaaatttacctactataaaatgcacccattttagtaagatgtttgagtttcggtaaatgtatacaccccgcgctatcaagatatggaacatttctgtcatcccaaggagttacttgatgtccttttgctgtcagtcccctcaccccagccctagggaaccactgttggttaatggtactgttcattagttttgcctgttctagaatcattcagtatgtgctctttttgtcttccgttgttaaaataacatctccgggacttaccattgttggtgtgtgtatcagtagtttgtacgttttctctcgtgctgataaatcacaatttgtttcttcttttttttttttgagatggagtcttggtctgttgcccaggctggagtgcggtggagtgcagtggtgcgatctcggctcactgcaagctctgccacccgggttcacgccattctcctgcctcagcctcccgagtagctgggactacgggtgcccgccaacacacccagctaattttttttttatttttagtagagacggggtttcaccttgttaaccaggatggtctcgatctcctgacctcgtgatccgcccgcctcagccttccaaagtgctggggttgtttcttcttttatctgttgatggacatttgagttgtttccggtttttggctgttattaataatgctactttttgggaggctgaggtgggcagatcatgaggtcaggagattgagactatcctggctaacacggtgaaaccccatctctactaaaaatacaaaaaattagcccagtgtggcggtgtgcgcatgtagtcccagctacttgggaggctgaggcaggaaaattgcttgaacccgggaggtggaggttgcagtgagccgagatcttgccactgcactccagcctgggtgatagagcgagactccgtctcaaaaaaaaaaaaaaaaaaagtaatgctactgtgaaaatgtttatgtacaagtttttaggtagacagaggttttattttctcttgggaaaatacgcatgtgtggaattgctgagtagcagaaagtgtcttacttgtagaaagtgtatgacttggccaggcgcggtggctcctacctgtaattctagcactttgggagactgaggcaggtggattgcctgagctcaggagctcaagaccagcctgggcaacatggtaaaaccccatctctactaaaatacaaaaaat

SEQ ID NO: 2439 - DNA, 200 bp, Homo sapiens
  misc_feature (1)..(200): DMR17:82848601
agccaggtacagaagtcatgagttaaatcgcacaaggacaagtaaaatgaaaaaaattagcactcagatcttcttttttttcatgctacaaaataacagtgaaaaacctaacgatgaaaatagatgcgaacagacaaaaggtcaatgggcttgatcccttctcatcctctctcctgtgtctcctggaggcttctgcacct

SEQ ID NO: 2440 - DNA, 100 bp, Homo sapiens
  misc_feature (1)..(100): DMR18:511101
ctgagtagctgggattacaggcacgcaccaccaagcccggcaaatttttgtgtttttagtagagacagggtttcaccatgttgatcaggctggtctcgaa

SEQ ID NO: 2441 - DNA, 100 bp, Homo sapiens
  misc_feature (1)..(100): DMR18:2109201
cgagatcgctccactgcactccagcctaggtggtagagtgagactccatctcaaataaataaataaataaatacatacatacataaacaaataaaaaatt

SEQ ID NO: 2442 - DNA, 300 bp, Homo sapiens
  misc_feature (1)..(300): DMR18:3590801
gccgcagaggttgtagtgagccgagacggtgccattgcactccagcctgggcaacaagaatgaaaccccgtctaaaaaaaaaaacaaagaaaattgaatgtaagtgtttagaaacttttatagcaattttatagagtgttttacctgttgaatctaaaaacaaaacaaaacaaaacaaaaattatgggtttgttttttgtatgtcttaaaaaaaaagtcctctttctagtaattcttttttgttgcattttaccaaagcactaatctgcagcagattgagggcaaacaaacaaactggtc

SEQ ID NO: 2443 - DNA, 900 bp, Homo sapiens
  misc_feature (1)..(900): DMR18:3997401
ctccccctcacccctaggctcggttaaacagtttggtcaaaggaggacagaaaagtccttatgagggcctcaagttgcagagttttctaaagcctgagttttactgtttctatccttctggtgtcacttaacatgttcctctgtccagtgtatttcctgtaaggtgtcatttaacatgttcctctgtccagtgtatttcctgtaagttgtagttagaattaagaacagcaccatacaatagaaatatgagccacaaatataatttaaaattttaaaatacacatttaaaaaaagaaaacattaaaattaaaattaattttaataatataattttatttaacccaatatgtcacaaatattatgtatgtagtcatacatacatattaaattttaaaatttaagtcaatattaaagtcaatattaaaaattattgagatagtttacatctttttttcatattaagtttttgctatctggtgtgtattttacgtgtacagaacatctcaatttggcctatccacatttcaaatgctcagtagccacatgggattagtactgaatacagtagacccaggtacatcatcagactgaggttcaatttttggccaaaataccccacaggtggtggtgtgtacctccatacagaagcatatgtctggtggcttttttgtgatgttggcagtcattgattaccattgtctacacccaataattcattaaaggttgcaaaatggcaatactcaaattttaaaattccttcttcatttattagatggagtacttttatcaagagaaacatctcatcaactgcttggttacttggaataatatgtatagggaagttaggaaaaatgtttgatctcttccttttatttgccagtttttaaaataatgattttg

SEQ ID NO: 2444 - DNA, 900 bp, Homo sapiens
  misc_feature (1)..(900): DMR18:6995901
taattttatttcaaccttaaaacttgatgaatactttacataaacacaaaaagttatttaaagaaaacggacaagtggtttatttagagcaaatcattcaaaatgagttaaaatttaaatcaaatatttgtcttatttgatatatataaaatagttatatccctgggaccaagactggcagatattatactgatcgtgtatatagtgattggaaaaaaaagttaaatattcttttttttatagaggtaaaagctctcatttttcaaaaacactttgtgacgtttgaggaaagtataacataaaaacatctcttagaggtccctaacctttctgaactaccattatagagaaaagaccactgcaaatcaagacggattcaagaaccagccccatcccagcgcacacataaacacacgcacacacctaaggaagtcctaagtttgaggaaaactcttatctaagaaaaggcatttaggaatggccatcccttttattgctacctggtgcactgcatagattatgtcaaattctaacgcatatataaagcaaaatttaagaatcacactgttttccaattagaattaaaagtaggtcgggcgtggtagctcatgcctataatcccagaaatttgagaggtcaaggtgggaggttctcttgagcttaggagttcaagaccagcctgcacaacatagtgagagctcatctctattaaaaataaaaataaaagaactagccaggcatggtggtgtgtgcctgtagtctcagctacttgggaggctaaggcaggaggatcccttgagctatggaggttaaggctgcagtgggccatgactgcgccactgcatgccaacctgggtgactgagggagaccctgtctcaaaaaaataataaaataaataa

SEQ ID NO: 2445 - DNA, 200 bp, Homo sapiens
  misc_feature (1)..(200): DMR18:8634901
acctatatgtatttttaaacttagaaatgtagcttaacttttttcctggttataaaattaatgataccttcattatagaaatttggaaaatgaagaaaagcacaaaagtaaagaagaaatctgtacctctggcatcctgaaaaaccaaattggcttcactgtatttagctttacgtcttgcttattttgtgaatattctg

SEQ ID NO: 2446 - DNA, 1200 bp, Homo sapiens
  misc_feature (1)..(1200): DMR18:8788801
actgacacatcaatgcaaccacgcaaaaatgaactgctaaaaaaacacttcaggacgagtgtttctgctgcctgctcttctcaggagatattagcgagatgctcacactgtgcactggactcttccctgacttcactccctggggttcccatcaaatgtgagacaatcacatttgttaagagagagtggtgtgtagaatggtttggaatgtgcgaggcaccttaaaaatagtcctgaatgagaagtagccatgcacggacgctggtcagatttcaggtataaaggagaccaggcctgtgcccagaggattgagtttctgggtcagaaatctcaaagagctcttctcctcagtgcctgcttttatccttcaatcaaggaagcacacaaagcactcacaatcccacgtgcctcagctgtgaaatgccagccacaaggaagttacgtggggttttatgccaagtatttgcactcatgtgttggcctcatgtactgcttttgaaataagtggttgcaaaactggccaggacaaaatggaaccctccagaaaatgaagccatggtcatggtgatggaattgtcctaatagaggagtagcattgctaggcactctagtgatggccatgaaaagccttccttttctgtttgtgtttgagattgtgaagttatcttcttaagtgtgggaagtaatttgtaagccactttctctggaggtagggaagttagcctttgtcaatcagtgtgggatgcagctctattggggaagacatggacgggagttccggaacactgacgtggggagaatggttacaattgtcaagactagtgtctcagcagcctcggaaacaagtgagggtggtggtggtttagataagctgctttaatagggagatcaagatgaatttgatgtataatcagaatcctaggtaagtgaacaaaaaaagggttttttttagaatcaaacctttggggattgggtggtaaagggaaatatttatttttttagaagacatttatgtgtcatgtgaaacttttctccaaatgtatgtggttgtatgcagttgtgtggcagtagagtaattctaggctgaaccttttgccatagcacgttttgtatgttgttttttgtaacattggagtgacgttggcatcccagctaggggcagttgtccgtgggagttttaatattgcattagcaaaaatg

SEQ ID NO: 2447 - DNA, 1100 bp, Homo sapiens
  misc_feature (1)..(1100): DMR18:10410601
caggtacatccgagaactgtaccgtgtctgagctgagagagagcttgaaggtcatatgcagtcctcaggcctcacggtgcagatagtggagccaagaacagagaacaggagtgcctgccctggtcagcttgtcttagttctcagctgaaacttatgttaaacaagtagctgatcgagattaagaatgatccaggtgactgttttaatccgtgcaaaagagaaaccaacactcctagtgaatgagccctgccagctcatggaaaccttctcccacttgttcacactttagtcactacccatctgaacaataaatccactgcctgtgatgtgctcaatggatcgtccttacagcatttccagcaagaccacacctcctgttgctgtctgctttcagatggcctgaaaggcccactgtcatatggtcaacaaatccagccctctgccagggagaggcccctcctactgcccaggaggtctttgcggcatgagaataatgcactggagagtgcttccttttggctggttctgcattctcacactgcctgcaatgagatcattttggtgctccacaatgggtgttgcatgtgggagccctgcgaatcaaagggaaagcaatcacaggaagatctgtcaatcacacagcacctgctatgtgcaaggtgctgctctaagcacactgcatatgttggcttattacttcccaaggtaatactacagatgagaggcataacctgtccacccagccatggcagagccatgtgacaccgaagggccaggggatcagtgcctctctctatagcctttccattgctaaaatgggcagggaaaggagctattatttgttgtttactatatgtggatggtgttagatgtgtgattttcattcagtcttatcaccttagggggagagatttttcctaccagctcacacacagccacaccctacccacacctatgtctgtccctgctgttctgttctcatcacactgatcactgtgcagtgggtatttcacttcattctttattctttcttcccacctagaaggcaaactgcaggacttatttacccctttttttccaactcttgggtggaacatggt

SEQ ID NO: 2448 - DNA, 1600 bp, Homo sapiens
  misc_feature (1)..(1600): DMR18:10739801
tatttgggattaaatttgattacatccagatataccaagcaaatttcaaatattgctttattaaaaactagcttgccgatttagaaaattatgtcttgggagagagaggccaacgtcagatctatgtgaaaccaataattaggtatgggaagaagttctactttatttgatttcctagtgattctaaatatcctcctagtagattcactcctacaattgtgtgatgttatttgtctcagtgatattccttgtccagttagattagctgcaagtatggagacatcatgtaaagactgaagacgacattatacgtaacttgcaaaataataattattcaatattctatgaaatttaaagaggactggattggaatggggcattccactataatcccatcgacctatagtgatattttctttgctaagcagagcaaatatagccactgagttccagaattcctcattcatctttatgatcaggagggaaacacactgcattctatgtggctatcaggatctgcttttaaaaatagttttctggtttttgctgttcattggtcgtctctgagcatcaggtggcttgaaggctgtgccacatgtgggcattggaatttagagtgcctttttgaaattggggaggaggcgtagtaagaaagtgagtgcattttaagttatccctcatctttctatttaataaattgccaaaaatccttaaatgcaaataaaatcaaagctgtgggaatgaggggaggggaggctcactggcatccatgcctagtgccttacagagaaagggtcactgaccctttgaatagaatgatcatccttaaatcagagtccaaggtggagcccaagctcatttttagtaagggtatttagccataaaatatgtatgtgaatagggctctcgacctcagaattgggcaatataatattcaattcttcttccctttctgagcccataaattatgccctagagtctataagccacgtgtttggctttctacagccagcacaagaatgtcagaacgtctgtgctgatgtctctggaagaattggaccccgggctcaaagacccactgacattaaaattttcctacactccgaccccctatcaagtcacaaggatcaaaccatgcatggaacacatgggtcacgggaacgcctgaattctggtcaaggatataagggttagagtcgatgaggttgtaaggggatcgagaaaacctactggaagcatgatcaacccaaggccgccaccactgcttttttttgcccttggctttctgtttgtctgcttctcctaaaataaaatacgtccacatattaattcgtataaagtgagaaaacaaattttgaaaaccacgctttaacaactcaattgtcaaatctaggtaaattgcaaaagtatatcagaggtcaggtaaaggaactatactgaatctgaaaaatatacatgtattaacagtcaatttcacaagataaatactaattgttcttttaacagtatgctacatcttcactttcttcttagtgactgagggcatacaaagacatataaaaaagaaaggattatctgtcaaaaatacatctcacattga

SEQ ID NO: 2449 - DNA, 1600 bp, Homo sapiens
  misc_feature (1)..(1600): DMR18:10924001
gtagataaatggtagccaccagtaattgaaggttctcagccagtgtttaaatgaataatgctgccagacaggcatggctcagaagacacttattgtccaaagccaccacagcccaattcctgctctccactctgtcccaacacacacacccaacccttgcaacatacacactctgaagcaaaagtgtgagttaaaatgaacataaagatgctttagtgtcgcttctctttttaatttggcgcaccgttatgttttgtggtttgtttcagtttatccatgttgcattatatacttttgcttttagtgtctgtttgccaaaattcccctgaaattatcctaggggaaaagcatagaatgtgtattaaggtcaaatccataagtaacttactcatttaaacttaaatccttcataaagggcttataaaaatattcagattggtggtgtttatgagactgtcccttaaaaatacacaagagaacataaatgcaatgtcggggattctgtcatttgtgcagaagttcaaagaggtcctatgttgcggccccacacgtgtgctaaggacacaaaatgactgagaaaagtagcacatgcaaagtcgaccaacaaggtatcttaagaaacaattgcatttttgcccaacaaaaatttctcttttgagagaaataagaagaaaatagggtaatttcatttttcttatttgccatgatttatataatactggcaagcatttcaatggagcattctcagtttccataggcggaggattttttcttttatattccttggggcatcttataaggcgttacaattgctttgtacagcttgtggctttctttacactaactacaaactccaccttgccagaagtgtgtgccaaatagtaatgttcgcttgttaaaattaaataaagaaatgccatagacactttgatagttaaaaattttatgaaaaataaaaacttatgaagcacatttagtttaaacttacaatagcagcttatttcttctttttcctgaacatatgtcaaatacaaagttcagacaaaagaccataatgtttatttattatatggagggcctggtggtttatagttcttcatttttaatacaattgataaaaatatatgccatgatatataataaaatagtaaatgtattgttaaatgtatgtagaaaaatcttaccatgtgtcacacatttcaagattttgatttcaagtaccatattcctgagaacattgcatatttctacatgattagttctgtcattatttaaattagctttgctcttaaatgtcaggtattacctttgggttaaaatgttggaaataaaacagacccgctaatttaataacatccatgagacaggtaaaagcaagacactcactcaatttattccataaatgttgattgatccctcaaatataatggacagtaggatacggcagtaaacacggatcttgtggcatactgagggacaggtgataaaaataatcaggctgcatgcacacacattccatgaagaaaataaagagggaggagataaatgtcaaaatgcaagggtttatacaaaaagtgaaaaaaaattttttttttctgag

SEQ ID NO: 2450 - DNA, 2900 bp, Homo sapiens
  misc_feature (1)..(2900): DMR18:11215301
agtctgtctgtataaagggaaggaaacagttgctgctcttgtgaagctgtctggcttaaggaatgacagaaagtgtttacatgaggaagtgcctgagagatgggccttcgaggatcagagtgatcatgaggggttggggtttaagagagttcgtgaatagaggatggcatgagtccaattgtggtggtagtgaggacagactctgagggcagctcacaatccagctcaactagagcaagcgacatatgtgcacagaagagcagtgggatatgagaccagaaagttcatctgaaagatactgcatcaaacctccagcaccagaccaaagacatggttgttcacatgtaggttacatgaaaccagtgaaagttttagagaggaaaatttaagtgattcaagctgaacttttgtgaattatcttgtgtgaccaatgttaggtaatccggaggccagattttgagggtgtaaatcaggatactagtggaaagagagaagcagaggcactagatattattgatagaattcttggtggtctggaaactgactggagggtggggctgaggtacacaggagagttcagagtaatccaagatttcaaatgtggatgcctagaagaaaacagggctttttggggtgagtcaggagaagatgtaggtctgggtgggaaagtgaagggttgaattatgtacacattgatttcattcaccaacagtcatcatatggtaacagtcagatagtagctggttagaactttgggagagaagccttgactagaggcatagatttttatttccgataaaggcagagcctgtgttgcaaccatgagctcatgagttagtcttcaggagagggcaacggactctttatttgcaaatgcatcatgggtgattccgatgctcagagagtgttcatggccacaggctaagtgcccactttctctgaaaggacacttctgcatgcccttcttgccaattccacttacaggcttgatttggactacatttcgtctacatactttatgtcaaaagtccatttagtatattctcctgaatcccttttctcaacacattgagcacatgaaagcaactggaaggcctatcacttttctacaacttcagcgcttttaaaaaccacacattgcattttgtgtgctgcaaatgctgtcataaacaattcaagctcaactacattctttaaactggtctaagcagagtacctgttaggatttccattcctgtatttaagggaagaacagaaatgtaaatgacccacactttgcacactcttttgtataggattccaacacagcatgaatttgaggtgaagagttctgaatcacagagtgctattcgggaggttttcgttatttgtacactagtaaatgtatgctgctttttgcattctttcttttacagaagagagattttaaaaagaaaaatatgtcccaatgagtgtatcagcttcttgattttgccaagaaaccttatttctgtccaacacagagagaaaatagtgcacaaaaagagagtagtagtgagaatatgatagataatgcacaaaagatgggatcagaatacataagggaaatctacaatttaatcttaaaataaagatcaataacctggtagtaatatgggctatgtttatgaagaggaagaccacttaagaagcaatataaataatcaataaacaaaatagcatatgttgaactcaccagtcaataaaaaaatgtccactaaactaagaaggttctatttttttttcacctatcagattgaaaaacttaaaactttgatactttgatacaagtaaggatgtggagacacttgtagcattgatatattgttcgtgggagtgtaattgggcacagacctccagggagtttgcagtctctgtttacattaaaacagccacaccctccaatccagaaatttctcttgccagtatctatttcataggaatgctcacacatgcacaaaacatacatgtaaagggtatgtcacaacattgctcataagagtgagaaattgaaaacaaaatagcaaaataaaaacagcagtgaggtaggtgataagctgtgatgtatgcatattatggaagaccaggagcagataaatataagaaagtgcacctttatgacgtctgttgggggggggattatttatcgaataaaaaattaagagaatgtgatttttttttttttttttttttttttgagacggagtctcgctctgtcgcccaggctggagtgcagtggcgggatctcggctcactgcaagctctgcctcccgggttcacgccattctcctgcctcagcctcccaagtagctgggactacaggcgcctgccaccacgcctggttaattttttgtatttttagtagagacggggtttcaccgttttagccgggatggtctcgatctcctgacctcgtgatccgcccgcctcggcctcccaaagtgctgggattacaggcgagaatgtgatttataacttgaggataataagtttataaacacaaattgatactgaatctttcccgagggggcacctctgcttgtaaaaggatgtagaaggtgcagcaggatttcacggtcacttctgatgagtgggcagagggctgcaacttgaggttctgaaaaggaatatgagtcttgtctttaatgctgaaaccttgcatcaaagtgaattgtattcacatgttacatgggtaaagaaactattaataattcaaaaacaatattgattataagcactatctggtacatatacaaatatctgaaaggatgaaatgattctgatttgttgaatgcaactttgtagagccttattctgttttctgactttgatgttttgtttttctaattattttgaagtaattggatactttcaaatgtact

SEQ ID NO: 2451 - DNA, 700 bp, Homo sapiens
  misc_feature (1)..(700): DMR18:11801901
tagacacctgagtagggacctccttcaccatctgtaaggaactggtaatagcaataatcagtataataatcaagcataatcatggcaaaaatcactgcaatacatagctgtcatatttacagttttaactttttcaaatataaacttggttacctgtttccctgaaagtttagggacattttttttctggtaggaagactacttgccaagaaaatttcattttctttatatttagagtcaagttagcaaaaagcgataaaataaagagtatgctccttacgaacttcgcccgaaaatccttttgctggccacttattttgttgtttggccctaaaagactgatgacagggtaagaactgaaaccattctgtttacggagttcctcaagtcatggacagtcctgggaaatgtcaagtccttactggattacctgaactggttggaagggagctgtccaccagtgcttgctcctcatggtttcttgcttttgccttggtgatgtggttgaattccccactgccaccctacacccaggcgtacttcttgatttcgaaacacactcatcaccatactcttgagaccagtcttgttgcaggcagtggctcaccctctagtccacatccctgacctctgcactcatggtcctgaagcagagctctgggattctcttcatccaaacccccagtgacttcccatccat

SEQ ID NO: 2452 - DNA, 1600 bp, Homo sapiens
  misc_feature (1)..(1600): DMR18:14313801
ggggtgattgggtggtgagtagggttggagcgattgtggtggggttgggggtgtaaggcaggggctggggtgcatccttcacaaatggttaaacaccatctccttaatgccgtccttctgatagtgagttctcttcatgattttggagctgtgagattgaatgaacactgacctgtgggattttgggtgtccattgggcctgtggtcccatttgtgttatttttcgtggaaatttcttccctttggattgagagagcttacccaatacctgtaccatcattgtaccttgaaagaaatgaacacacttttaacttcagggactcataggcagaagagactgtggccttgtctcagatgagactttgaactttttacatttgagttaatgtgggaatgagttaaggcttttggaaactttgaaaagacacaattgtattttcttctgtgagaaggatatgagatttgggggggtcaaggtcagcataataagatttggctgtgtgtccctggaaaatctcatgttgaattgcaatcccaaatgttggagttggggcctggtgggagattatttaatcatgggtgggagggttaggggtggaagaaaaaaggggtgggtagggtggggaagagtaggctggctgtagggtggtgggagggtggtgggtagtaggtagggggagtagcctgctgcagaggcagaggctcctggaaaacctctaccagggtagtgcaccagtggctttgcaggctttagcccccatggctgctctcatgggctgggctgctgttgagtgcctatcacttttccatactgagggtgtgaacttttggtaggtctatgaatctggggtctagaggatggtgggctcctgcatagtcactcaaagcccttattttccttgtgcactgccatagtacaggatttccaggagcctctgcctctgcagcaggtttctgtctggaacggtagccggtggagatgtgttggggggtggatccttcaccaatggttaagcaccatcttcttgatgctgacctagtgataatgggttctcatgagatctggttataggacggtgtggcacctctttcctctctcagccttgctcctactcctgctgtatgaaacatttcattgctgttttcctactggtatgattgggaggcttcctgagtcctcccagaagcagaagccactatgctttctttacagcctgcagaaccatgagccaattaaaccccttttcattatgatcatacagaaaataaagtactgcgaagtggagctatgaaatatcttcaatgacatttccccatcgtcttggctattaacattggacttcttttaatgcaaatatctgaaggcttcttgaagtttccccctgaaaatggacttctttttcttctgcattgccaggctgcaacaaagatagctgaaaatgtaaagcaggttcagaagtgggtaacagccagaggttggagagtctggagatcttgaaagaagacaggaagatgaaggaaagtttggaccattgtgggcacttgtcaaatagttgtaattaaaggctggcagaaggatggaagtgaaggccaggcttac

SEQ ID NO: 2453 - DNA, 5100 bp, Homo sapiens
  misc_feature (1)..(5100): DMR18:14484901
ggctggtcttgaacctctgacctcaggtgacctgcctgtcttggcctcccaaagtgctgggattataggcatgagccaccacacccggccagaatattgctacttttgcaaatagctacaattgaccctgatctggactttgagttgatcacagctttgtaaaagaggatagcattgtaaaactacaaaattagcctaataataaataacatagaatgctttcagtataagaaataatactatcctaagcaaaaataaataaataaataaaagtggaggaattatattatctgacttcatattatactacagaattatagtaaccaaaagagtagggtactggcataaaaagagacccatagatcaatggaacacaatagagaacccagtaacaaatctacatacctacagtgaactcatttttgacaaaggtgccaagaacatacactggtgggaaatgatgttgaaaaaactggatatccatatgcagaagaatgaaatcaacttgccagaattatatcattgtgctttgcatctagtttcacttttccaaaagcctatacagatttcagatgtttagaaaatagctcttgttttccttctgggtaatctttttcatatttcatatttcattagatttagggatgattacattgaggggttgggactagactgaaggcaccacatcatcaatcacttggaaacaatattttgcctatgtgttatgttatattgacaaaaacttttattgttgcaggcaaatttcctaggacctcccttctgcgtcttttaaaaaatgaaaacaaaatcaatgtagcgcagcaagccagggagtctgctttgattgacttatggccatagtcacccagcagttccttcagatgtggcttcccaggtcagccactgagcccacccctgtcttcctgcctgcagaagtggctctgtgagccatttgaggagaaaatgggggactttgggcttcagcccgaggagaacagggtggagatggaggagcccctgggcgtccgcaggttaactgaaaacatgagaaaacacaagcacgggaccaagtctgtcactaacctgtaaaaaactctcaccaagccgactgggcactttgtctgagcgcctgcctttgccaccactgtgtgcgggaatgcctggggcacgactgggccatcccagtgttcttatgtctatacattccgaggttacccctcagcaaaacgccagaggctggcagacacagcggagcatcctgcagtagggatccgaagccgtggaatctccaaaggaccacttgaccgcgtcccagaatctccagctcaggccggacattgcccagaaagcccacatcgtctttggcaagacctcccggattgtggttttgatttgcatttctctgatggccagtgatgatgaacattttttcatgtgtctgttggctgcataaatgtcttcttctgagaagtatctgttcatatccttcccccactttttgatgggattgtttgattttttcttgtatatttgtttaagttctttgtagattctggatattagcccgttgtcagatgggtagattgcaaaatttttctcccattctgtaagttgcctgttcactctgatggtagtttcttttgctgtgcagaagctctttagtttagttagatcccatttgtcaattttggcttttgttgccattgcttttggtgatttagacatgaagtccttgcccatgcctatgtcctgaatggtattgcctaggttttcttctagggtttttatggttttaggtctaacatttaagtctttaatccatcttgaaaagttaataataataaagataataatatggaagaaatttaaaaaaaacctcccagagagcaggaacttggtcggggcgcgcggcctgagatcaccccaagctctgggtgccttcctatccttctgcttcttccttggccgctttagggggcgcgcctcgccgtgggtctccctgcgggtggtgcagtggtgctcctggatgtcacctccaggcgcttttgagactgcggcaggcaccgggcaccaggcacctgcggattggcctccccagaccgggctcagggacctccagcgctccgcggtgcgggctgcaggcgacctcaacgtggagctgctgccagcgccacaggccccaggggaggcccaggatgctgcttccccgccccaagaagggcagtttggaggaaagtctttggcctgatggaaggcggcgcccatcgggggcggggctgagaactaggctggcgccgctgcctggtaagcggggaccaagaggcccacggcctccatcaggaagcaggtgcttctccaaatcccggatttccaggaggaacaacggcgtcaagctggctgacaccaggaacacccagaagtccccgctcctgtctgtccttccgcactcaggagcggggatggccacagggacaccatccgcccacaaaccgctggcgtttgttgccatggtgcgcggagatgcggtccccgaggaggccactttcggccaggacgccgggatcgtatcagcggcagcatcccgcgctgacactcagtattgactttccccggacattgctggattttttgctttttaaaacaactttgcagtgggagaacaaaaaagggcatcctcagagcttttgcaaaattctcctggacctgtggttccatggtgttcacctctgcgttttacggaccactaattggccagagctcctaaggcctataagggccccacccagcgctttagacacccctgagggacattcgcggctcaggaggataaaggtcctcaggggcctgccgcgaggaggacatgcagcccctcagccaccacatcttcctccattccagcctggaaagagagaccttgccctccaccttacaggccttcatgaccttgggacccactctagaggccacgcgcatttccactgccaaagcaatgacacgagatggaaagaaattcttggccaggcgcggtggctcacacctgtagtcccagcactttgggaggccaaggcgggcagatcacgagggcaggagatcgagaccatcctggctagcaaggtgaaaccccgtctgtactaaaaacacccaaaaggcggccgggcttggtggcgggctcctgtagtcccagctactcgggaggctgaggcgggagagtggcgtgaacccgggaggcggagcttgcagtgagccgagatcgcgccactgcagtccagcctgggggacagagcgagactacgcctcagaaaaaaaaaattttgccttcactatatgcctaagtaatttctctattagagcccagagtcgtggggcccacaccgccagctgacacatgaaaatgtggcaacgatgtggtggtgtctctgtgtggcagcgtggtggtgtgtctgtgtagtggtgtgtccgtgtggcagagtggctgtgtggtgctatgtccatgtggtggtgtgttcatgtatctgcatggtgatgtctccgtgtgacaatgtgtttgtgtatccatgtgacaatgtctgtgtgtccttgtgtccacatggcagtgtctgtgtggtggtgtctgacagtgtggaggtgtgtccatgtgacagtgtggcggtgtgtctgtgtgtggcagtgtccatgtggcagtgtgtttgtgtgttcgtgtgatggtgtgtccatgtgacagtgatgtctcttgtgtgtctgtgtgtccctgtgatagtgtggtggtgtgtccatgtggtgatgtctccgtgtgtgtgtccctgtgatagtgtggtggtgtgtccgtgtggatttctccgtatgtctgtgtgtccgtccatgtgaatgtgccagtgtgtccatgtgacggtgtgtccgtgtggtaatgtctccgtgtgtctgtacatgtgacagtgtggtggtgtgtccgtgtaacaatgtggcggtgttcccttcccggcttgcgaagctggcgtctttccctctcagcccaggacgccccaggagacccccagcttggagggcaggaggtggcttctgtggagggaggcgcagggagccccaacagccgagtttgtggggtcccctggggagtgaggagaaaggcgcccgggcagccaggacaagcctgggcctgccctaaggaggtgacccactccgggcctgcattttggggcgagcactccagctctgtcatcttgtcctaagtcctttgtgtgccgtggagattgctgagttttgaagaagggaaggtcatctttgtcgcggaaagcctgatgtgtttctctattgctgtcacttttcagcctcatcgctggtgaaacatcaaacattgggcacattctgccaagaaaactcccggaagaaaatgtggggactggcagtatccaaccagaggagtcacacacagatttctgtttggttggagatcggccgtttttccctgtgggtgggggaagcggagcagctctgcagcgggaaggaaggtgggttctgtgcggccaggaaggtcctggcccggggcggaggggcgagaggggatgtgcggcgaaaggctgtgcagggcagcgggcagtgtgcatcgcccctactgccgggcgcccaggaggaggacaggtcccggcctggcgggagcagaggcggcggggctggagtccccacaccgggcttgagggccggcggagccgcaggctgtggccgagggggactcccgggcacctggtgggcgtccccatgaccaggatacacaccgggctccggaggccaggcggaccaagctaggggtgccaggggaggctcgaggttcccgcggcgggaggtgggtccctggaccctggtgtcctgctgctgtcccacacatgggccgccttcgctcaggggcaccccgccagggtcgcctatctgggacctcagcgcagctcctagcgggcgggaggctgaggcagagacctcggggcccagctgggtctgcagtttccaccactcgtgacgcagggcgagctcaagctgtgccgcccaggcaggaaaccctccgaccttgccatctttggcgccagccttggtgactgtctccagctcagc

SEQ ID NO: 2454 - DNA, 1300 bp, Homo sapiens
  misc_feature (1)..(1300): DMR18:14721701
tgtcctcataagtgaaaattgagcaaaggcttcaaggagggaaaggagctgtccaaggtgcttagggaagagcattgcaggcagaagcaacagagagaagatgttaggagggaactccttggtgtgtctaaggctcaggatggagtctggtgcagcagagagagggaggaagagaagcaagggaggaggccagggagtagctgggctgagatcagtacagattgtgtaagccctgggaggttattgctggggctttgacttttactctgactgagatgggaactacgggaaggttctgagcagccaagtgacatcatctgtctccctatttaaaagcacccctggctgctgagttgggaaagactataggaagattttggtagaagcagggaggccgagctgttaccacatccaggtgggagatgatagtggtcctgaccagggtcatggtggcggtgagagatggtcagagcctggagacatgttgaagactgtcaacaggatcctgacagactggacatggggtgtgagagaaggcaggggtcaaggctgagtttgattcaaattgaattattaagtaattaaaaaaacccactgctgcctttcccaatcctactaagtaaaggatgctagattaaagaaatctcaggtcaggccggtgcagtggctcacacctgtagttctaacagtttgagaggcagagatgggagtatcttttaaggccaagagttagagagcagcctgggcaataatagcaagacctcctctctacaaaagtagaagaaagaaatttaggaaaataaatatagccaggcatggttgtgtattcctgtggttccagttactctggaggctgaggtgggcagatctcttgaggctaggagtttgcagtcagcttgggcaacatagcaagacttctttctccacaaaaattaaaaaaaaaaaaaaagcctggcatggtggaacctgcctgcattcccaggtattagggaggctgaggcagaaggatctcttgaggccagttggtcaaggctgcagtgagctatgattacaccactgtactccagcctgggtgacagagtggaaccccgtctcaaaatacaaatccaaataaaatgaaatctcaagttggaccagtcccatctaggctatgcaggcctttcaactgcatagccacatgatcgggtttgtgtggctgtggatgaggagacccctgcccaattgttgttgactgtacaatcggtttatttttaaatatagtaatcaaatatatttcatcatacttgatggtctcagatat

SEQ ID NO: 2455 - DNA, 200 bp, Homo sapiens
  misc_feature (1)..(200): DMR18:14842801
ctgagaaaaaggacttagatactatcactggattcatttgtggctggttttgtcatatttacttatgactgataataaatctcttttgctttttagagtctcctgaaaagccttctcactttgaggtattgagttttataattttatcttgcattatttattaactatgtattttgtgaagtacacattcgttattaatc

SEQ ID NO: 2456 - DNA, 300 bp, Homo sapiens
  misc_feature (1)..(300): DMR18:15338101
cttgaacccaggaggcagaggttgcagtgagccaaaatcgcaccactgcactccagcctggtgacacagggatactctgtccaaaaaaaaaaaaaaaaaacaggtgaattgtttaggaactgtagacatttaactcacagattagagactgtaataggaaattggagaggtatatgcccccaggtgaaacattggtcaagtctttatgagatagtattgaacctaatgcagaattttattcttctccatttttatattattgtttactatataaattaaacagccatttagttgcttctc

SEQ ID NO: 2457 - DNA, 200 bp, Homo sapiens
  misc_feature (1)..(200): DMR18:15705801
gaaaccggattacatatacaaagtagacagcagcattctcagaagcttctttatgatgtttgcgtttaagtcacagagttgaacgttccctttcatagagcaggtttcaaaccctctttctgcagtatctggaagtggacatttcgagcgctttcaggcccatggtgaacaaggaaatatcttcccatgcaaactagaca

SEQ ID NO: 2458 - DNA, 1900 bp, Homo sapiens
  misc_feature (1)..(1900): DMR18:21103501
caggctagagtgccgtggcaccaacatggctcactgcagcctcaatctcctgggctcaagcgatcttcctacctcaacctcccaagtagctgagactacacccaggtaatatttttattttttttgtagagccgaggtccctctctgttgcccaggccggtctcaaactcctgggctcaagggatacttgcaccttggcctccaaaagtgctgggattacagaccaccatgccaggcctatcatagaattttcagagacacaagagacatcagcaactatctggtccaactctttgttctacaaatagggaaactgaagcctagatgagaaaaatgatgtacttcattacacagagatttaatagcaaaacaagactatgctctgaattttcagtccagtgttcttttcacaccacactaatggcatatttttaagaatactttccattgtgaattgcagtactacctgttcatcttcttgaacacatgtgtgtcgtatccaacagctatactgtggacttaaactaaatggatataccccctttttagtggggatgaggaatggagaagtagagctattggattatcttcagcaatagaactctatatataatatttcctgataagtgggtttttctatcaattatcgtaatagaatctgtagttttcaccatatatccataacaccaaaacttataatcgtgaagcaaaactggtgtaaagttatgcaaagtctaatctaaaactgagaatttactctttattcaacataaaattttatatgtagttccttcttctggattaaaaacatttctgggcagggtgcggcgctcatgcctgtaatcccagcactgtgggaggctgaggcgggcggatcacgaggccaggagatcgagaccatcctggctaacacggtgaaaccctgtctctactaaaaatacaaaaaattagccgggtgcggtggcgggcgcctgtagtcccagctactcaggaggctgaggcaggagaatggcgtgaacccaggaggtggagcttgcagtaagccaagatagcgccacggcacttcggactgggcggaaaaaaaacatttctgactcaaaagattaatgaattaaccaattcatatctcagccgttactctgagccacgtctctacacacccacagggtgcctgtagtgcaagagggcctatttacagaacacacactgaaagtataaaagatacacacagaaagagaacaagataacaactcaatctccataaattagttcccaattgccttttatatccaactaaacccttggcacaaagtatataccatattataaatcacaactaaacaaataaacagtctctaaaagatcttccccatttattgaatctattaataaatgtctcaattttcagttacaattggcttagacgtcaataacgcacagctagattatgaatttatgagcggcttgaggtgccagataaattactctgtacttagagacgacaataaatatcaacttctagactaagcacactgactagtatataacagaaatattataaatatgacaatattacaaatgcttactaaataccaaatgctatgatagttgctttgactatattattcaattcttacaacaatctagtacttttatcccctcttatttttctgaagatgaaacagcattgagaggttaaaataactccctaaaatatttcagcaaatacatgtcagagcctagatttcaatccaagtttaggccctatacaaagatttgctgaatgaataaaaatgaattaggagagtaacttgtttttttaaaagaagttcctgcaacatactaacatccaaaaaagtctggtccaaactaaccagatatgcaattgatactaataaca

SEQ ID NO: 2459 - DNA, 2100 bp, Homo sapiens
  misc_feature (1)..(2100): DMR18:21379401
tctccatgttggtcaggctggtctcaaactcctgacctcaggtgatctgcccgccttggcctctcaagtgctgagattactgatgtgagccaccacgccaggaggttttcaagattttcaatgatgaaaggaagataacttgttggagtggtaatagattaagaggcagcaatatttccagacattggtgctctggaaaaaggctgaaagttcacttttgatgttatttcattgttcacagataagcaatcctatggttaactctgtgctagttcctggtccttttctctctttagcaaggaaggtgaaatggttgttggattttggtttagacgcataaactagtggcacagcctatttctcctccaaccttccccctgttttgatcacgtgtggtgctgctgaaaagtaaattacttctgagctttaaaaatttttaatgtttgtattgtactggtggggagtcttaggagcctggccaaaaacttggtgtttcaggaacatttcagttgacagactttgttgattttcttctatttcttcatcttttaattgggtattttatatacatatgcaacttgtaattgggtattgtacattttgagtataaactttttgtaaaaaagaaacctaacaatttaaattcatggcattttgtttttattacttatatcagaaaagttgccaaaataggaccctggctttttcttcaaatcataggaatctctaataaagctttgacaaacccagccactctgatggaaatcatcgcatactacgcactgccaccaggaatcacatcagaagtcttctttgctgtgtaaaagtagctcaggggcaccaaaatcttctgcagagctttagtgtgtgtctgggaaacttgagatagagttgtggattcccatgcatcatctcctccctgctcatgagtgggcacgctgggtgttggcgccctttcctgatgaacactgatgcatcctcagggttcttctcaaccagtcctccagggactctctccagggagttaatcagagttggcattccagataaattttaaattcgatccctctctttgatagaaggggggcctaagatattctcaaaattacctgtcttgaaatgagatttatccaaggtgaggctgtacagtaagagtgcgggctttgtcatcacatgactagatactgagtcctggctctatcccttaatagttgaatggtagtgaactggtcacttcgtttcttcaagttttggttttttgttttgttttttaatctgtgaaatggaaagaggtcatacctttttcagaatactgaggattaaatacaacaatttttgtaaagtgcttagtagactatctagcccaatagttctcagattgttagtattagaacccatttatactgttaaagattattggccaggcgcaatggctcacacctgtaatcccagcactttgggaggctgaggcgggtggatcacgaggtcaggagttcaagacgagcctggccaagatggtgaaaccccgtctctactaaaaatacaataattagccaggcacgccgggcgcggtggctcacacctgtaatcccagcactttggaaggccgaggtgggcggatcacaaggtcaggtgatcgagaccatcctggctaacacagtgaaacaccgtctctactaaaaatacaaaaaattagccaggtgcagtggcgggcgcctgtagccgcagctactcgggaggctgaggcaggagaatggcgtgaacctgggaggcagagcttgcagtgagccgagatagtgccactgaactccagcctggacgacagagcgagactccgtctcaaaaataataataataattagccgggcacagtggcaggcgcctgtaatcccagctactcgggaggctgaggcaggagaattgcttgaacccaggtggcagagattgcagtgagccgagattgcgccactgcactccagcctgggcgacagagtgagactgcatctcaaaaaaagaaaaaaaaaaaaaagattattgaggaccccatagcatttttgtttattaaaaattaaaactgaaaaattttatgaatatgtatta

SEQ ID NO: 2460 - DNA, 2200 bp, Homo sapiens
  misc_feature (1)..(2200): DMR18:21598401
cattaaaaaaattacttggccgggcatggtggctcacgcctgtaatcccagcactttgggaggccgaggcaggcggatcacctgaggtcaggagttcaagaccagcctggccaacacggtgaaaccctatctctactaaaaatacaaaaaaattagccgggcatggtggcacttgtctgtaatcccagctactcgggaggccgaggcaggagaatcacttgaacccaggaggcggagattgcagtgagccgagatctcgccactgccctccagcccggacgacagagtgagactccatctcaaaaaaaaaaaacaaacaattacttgttcactacaggattataatattgattgagaaaggtgagacaatagcatattttcctcagttagcaatgataaaggagttctagctcgtaagccaggacaaattttggaattgtgcttccaaagtcacatatctgacccaacagtgatactctgcattctgcctaaaagggaaaaagtggctctattacagtcctagtttcctcatttcctcacatgctctaggcctgaatttgcgacttccaaattaagcacgttttaaagcacttctcatcctactcccatgtctaattccattgattagattttttgcttttcaaaaaaaaaaaaaaattcaccaggcacagtggctcaggcctgtaatcccagcacttttggaggcccaggtgatcacttgatcccaggagttcgagaccagcctgggcaacatggcgaaacgccgtctcaacaacaaatagaaaacttagcctaacatggtagcggacgcctgtagtctcagccactcagggaggcggaggtgggaggattgcttggggccggggagggaggtcaaggctgcagtgaacagtgattacaccactgcaatccagtctgggcgacagagcgagaccccgtctcaaaataaaataataacttaaaactttattcgtgttggtgtcctgtgtaaagcagaaactaagtacttgaccagaagacaaagtgaatatagcatagttcactgcaacctggatgttttcaactgaaatctatgttttatccacttttttaaaaaagccaatgctggtggggggactaaccacaccttatgccaccaagtagcgcttttgtttcctgcgaagcttatttattgagatatcgttttgtaatactatctagatactgtgtgctgcgattcctgtttaaaggaatctcattgcagctaagactacagaaaacatggttcatagtacttctcaaatcgcaaagcttgagctccttcctcctcctcttcctccctcccctggtccccgctgcgtccccatcgccccggaaaataaagcacacgccggattttcggacgcatcattgagaggcggagggagaggaggtagtcttcgaattgttggacttgctatcccattctgcctgtgcaaaataaacccccatagtaaaataatcttaacccgtgataaaaatcgaggacccaattctctttggttcgcctctctccatcgctataaacttcactgcggccctcaatgcactcatttctactccagagccgccctacctgtgccgagacccccatttgcagcatgagttactctatgaccttgggcccgctcccctcccaaactgaaggctgtaaaaccaagaccccacatcgcgccccgcaaactgcagaggcctccaggctcaggccgggtcagcgggttgcgccaggaggcggcgagggactggctccggtgaagcgccgggaagagaaaacgcagggggcggagacggggcccggagctacctgcgggaccagcactggcgctgccccggtgctagcaatggctgcgcgccacctcggggctcccggagccctcgcggcagtgctgggaactccggccctgccccgtcggcggtcacgaccccttatgaacttcgaccgcccagcaaacagcggcaggtggtgcgcggacacgcgagcacgttagctgcctacctcaagcgacggcgtcttggagcctagagcctcccacctccctcccaggggcgcgaagagctgggaccggagcagtaggaaggggcgtgcgaggcaacacgccaccgagggtggaacaggaagagggagaactgtccgctccctgaaggggctggcaaaagagaggtgaagacacaggcggcgggg

SEQ ID NO: 2461 - DNA, 1100 bp, Homo sapiens
  misc_feature (1)..(1100): DMR18:23499601
ctcctgttcactgtgaagtagaggaaggcagtgatagccagacagggacgtgtgtttagggaagtcctctgtgttttcagttctgtttttgttttgtttttatgatgggagagatgagcaaatataaaggctgcttctaggagcaggagtgaggagaggttgcctatatgagagaaacgggatggtcaatactgtaggtttttttgagaaggtgaaatatggaattcattttttaaattttttaaatttttttttttttgagacagagtctcgctctgtcacccaggctggagtgcagtgatgtgatctctgctcattgcaacttctgcctcctgtttatataaacaggccaaaccctgtatgtatgtatgtatttatttatttttgagatggagtttcgctcttgttccacttgttgcccaggctggagtgcaatggcacgatcttggctcactgcaacctgcaactcccgggttcaagcgattctcctgcctcagcctcccaagtagctgggattaccagcactcaccaccacagccggctaatttttttgtatttttagtagagacggggtttcaccatgttggccaggctggtctcgaactcttgacctcaggtgatccacctgcctcagcttcccaaagtgctaggattacaggcatgagccactgcacccagccgaaagatggaattcaaagaagtgctggtaagtcactgtggtatttgtgaaaaaataaaaataaagagggtttgggctaggcgcggtggctcatgcctgtaatctcagcactttgggaggccaaggggggtggatcacctgaggttgggagttcgagaccagcctgaccaacatggagaaaccctgtctctactgaaaatacaaaattagccgggtgtggtggcgcatgcctgtaatcccagctactcgggaggctgaggcaggagaatcacttgaaccgagaggtagaggttgcagtgagccaagattgtgccactgcactccagcctgggcaacaagaggaacaagagcaaaactccatcaaataaataaataaataaataaataaaaacagggtttggccttgggcaggatggaccgt

SEQ ID NO: 2462 - DNA, 2400 bp, Homo sapiens
  misc_feature (1)..(2400): DMR18:26562101
ccaaatctctgactcagggaaaggcaccacaattcaccctgtatccataactgaaacctggacaatatcccatcctccttctcactctttctcaggctccacttccactgaagcaccaagccctgccaattgtgtctcaagatttgtttgtttgtttttgagatagggctacccaggctggcctccagtggtgccatctcagctcactgcagccttgacctcccaggctcaagtgactttcctacctcagtctcccaagcagctggaattacgggcacacatcaccatgctcggctaatttttattttttgtgtgtgaagcccggtggggggtgggggggtgggggcggggggttctccctatgttgcctgggctggtcttgaactcctgggcttaagtgatattcccacctcagcctcccaaggtgttgggattacaggcatgcgccactgcacccggcctcaagatttgttttgaaatccatctattatgtcttcatccaaaggctgataatagtcttttcttttgtattaatcggcttggggtactattaacaaaatactatagactgggtggcttaaacaacagaaattaattttctcacagttctggaggctggaagtccaagattaaggtgtcagcagggttggtttctgttgaggcctcttttcctggttgtagatgacctcttctctgtgtgagagcctggagagagagggctctctggcatctctctcttcttatgaacacatcagttctaccagattagggcccacccttatgcccttgtttaaccttaattacctctttaacaaccctatctccaaatagagtcacactgcagggttagcgcttcagcatatgaatttgggaggaacacagttccgtccgcaacaccatccaaatctgctcctcctgctttatttcccatctctgcaatgcacccgagctaggaactctgtagtccccttccctgcttcctctcctttatgtcaaatccattccattcagcccatgctctccagttccaatggcatcacactaattcaggccacttctgctgttcagtgatgcagcaaacaaagtagaaggtgaaactggaggcagcaccacccacaggagagtgggcagcctgcaaacgtgtccaggctgagtttagtctctgatccctggtcctttgtatcctttaacttagactattggtataagtttgtcttccctgaaaaccaacaaaccaaactataacgtactccctgcctactcctttacaggggtccaccattctccaaaaccagcctcaccctccagctaccaggaagtaattgctcttccttgaaaacacttgtctctcatcctaccttgactcttatgcccttggccatactcttcgtctcctggctcaacaactcaactcccagagatctttttggaatgatttcacatgttacctcctcttggaaacattccctgacttcagcaggcctgggcttccctctctgtgaaagcaagagaatgtagtatagtggcgagtgtatgggctctggcaccaaacaacttggattcaaattctggcactgccacttatgtgttgtgtgatcttgggcaaaatctttcacctttttgtttgtagaataggggattgttgtgaggactaaatgagttaatatggataaagagcttagaagagtgcctggcatactcttaagtgcttattcatgttagcaatgatcatgatcttgccttggtagtgccaaccactgaattgtgagtcttccagtcttagctcaagtcctctgaggcaccttctctcactctgtatggcagatttctcctttggttccccagcactttggacaggtattgtaactgctatttttcttcttaaccagactccttaggcttcattcaaagagaggggcttttttttttttgtattcgcattgcctagcatagctactggcacgtagaaggtatttgacagatgtttcttgcatgtattgtaattgtgaatttacatgcctgtatcacccatttggctgtaagctccgtgtatccattcattttttgcacaaggagaaggactgggatgctaactcagactgagcatggacttggagccagatagcctcactgagatcaagcagtgctactttctgactgtgtaagcttgagcaagtcacttttccagtcaaattctgattaacacaatatataccccaggcctgggctctagctgcacctcagtgtgccttatacctggaccatcaattcccatccatgtcaccagcctttctccaaacagctcccctctgcctaggatgcctttccctcttacacacttgacaccttcctagttatctgttaggacccagctcacacatgtctttgaggcttttagaa

SEQ ID NO: 2463 - DNA, 700 bp, Homo sapiens
  misc_feature (1)..(700): DMR18:26620401
ctgacacttttatgacagcaatcaaaattgcattttttttttttttttttttttgagacagggtcttgttctgttgcccaggctggagtgtggtggtgcaatcacggctcactgcatcctccacctccggggctcaagctctcctcccacgtcagtctcctgagtagctgggactaaggcatgcagcaccacgcctgcctaatttttgtattttttgtagagacagggtttcgccatgttgcccaggctggtctcaaactcctgggctcaagggatctgccggccccggcctcccaaagtgctgggattacaggtgtgaggcactgagcctggcctaaaattgcaaatttgatagcaatttaaaaataaaaggtaagggtggtggtgtagctttattcactgcatagcagtcatcctgaaacacttgaaaagctttttttttttttttttgagacagagtctccctctgtcgcccaggctggagtgccgtggcgcgatctcggctcactgcaaactccgcctcccgggttcacgccattctcctgcctcagcctcccgagtagctgggactacaggcgcccgccaccacgcccggctaatttttttgtatttttaatagagacggggtttcaccgtgttagccaggatggtcttgatctcctgacctcgtgatccacccgcctccgcctcccaaagtgcc

SEQ ID NO: 2464 - DNA, 700 bp, Homo sapiens
  misc_feature (1)..(700): DMR18:30755901
ttatgagtactgagattgagtcaataataaaatatcacccacaaaagaaaagtccaagactcgtcagctttactgctgaaatcttccaaacattaaaacaaatctaataccaactggtctcaaattattccaaaaaaattaaagaggaaggaataatttctaacttatgctatgaggccagcattaccttaataacaaaacccaccagacaaggatacaacacaaaaagaacactacaggctaatatccctaatgaacatagatgcaaaaattttcaacatagtactagcaaactgaatccaacaacatatcaaaaagacaatacatcatgctcaagtagacttttatccaagaatgaaaagatgattcaacatacacaaatcaataaatgtgatacagtacatcaacacaatgaaggacaaaaaccatgatactctcagtacacgcagaaaaagcatttgataagagtcaacattgcttcatgataaaaattctctatattttaggcatggaaaaaacaaacctcaacataataaagaccacatatgacaaactcataacaaacatcatattgaatgtggaaaatctgaacatcttttctctaagaactggaacaagacaagaatgatcactgttatcactctgattcaacaaagcactggaaattctagctagaccaatcagacaaaagaaacaaata

SEQ ID NO: 2465 - DNA, 1500 bp, Homo sapiens
  misc_feature (1)..(1500): DMR18:32116401
agctttttagtcttatttatttctatatcctttgcggagttctgattgcaatggaagaattgagtttgtatgtggatttttagtcagtaagaaaattggcaaaggaaggaaaagcttttttttttttttttaaatttttaaatttattttgtttgttctgttttgtttttagacagggtcttgctctgtcatccagcctggagtgcaatggcgtgaacatggctcactgtagccttgacctcctgggctcaagcagtccttctgcctcagcctcccatgtagctaggaccatgggcgcatgccaccacatccatctaattttttgattttttggggtgggggggtggtttttggtgttaaacacattgagatggggtcctcaatttgttgcccatgctggtctcgaactcctgacctccggtgatccacctgccttggccttccaaagtgctgggatcacaggtgtgagccaccacgcctggccagaaatgtttatttttatttttaatttatttatttgtagacagagttttgctcgtctcccaggctggagtgcagtggtgcgatctcagctcactacaacatcgacctcccaggttcaagtgattctcctgcctaagcctcctgagtagctgggattacaggtgcccaccaccacgcccaactaatttttgtattttttgtagagatggggtttcaccatattggacaggatggtctcgaactcctgacctcaggtgatccacctgcctcggcctcccaaagtgatgggattacaggcatgaaccacccgcgcccagccagaaattttttttttttaatggtaggaaaaatatgatctgtgttatattcacggtctgagcaggaaacagtgggctctaattatgcgatttgaggagaatttagtaaagagactattttcaaagagtagtatgttaggtacactatataagtagggtataggaagccacaaggaataatggtgtgctctgggtctactgaaagcaggagagaggaggaaatagataacagaacctgaagaagagagctgaatagagcatggctatggaaattcttaaagtggcatttgcatgcaactgagtagaaaaaaaaattgcaaaataaatccatagatcatttcactaattcatactgtttattatacgttctgaagtgctggacacactccacgttatgaatatacgggaattggtaaaacagacattattttttccatgtatctaactgtaagctataacttccagttgagccatctaaaataatctgtgtcactttcattcatatcattcagagtagtactgtttactgtaaattagtaaatattggaggatgttttagcaaaattattgcattggtgtggggtagtttctcataataattagatagcagtgctaattttactaaggccattcctattttataacaacattctgctgctaacataagattatatatttttgttttctttagccacaggaa

SEQ ID NO: 2466 - DNA, 200 bp, Homo sapiens
  misc_feature (1)..(200): DMR18:33844601
atgactttcttaatgaatttttattatgaaaaagacaaaaaaaatcacaaacacaaaaacaaaacaaaaaaccgacaggtgaaggaggagagaaaaccaaaattacctaggtttaaaaatctccaacattataagtgtgtcaaaaaatgagtatcagaaattagaaaaacacagatagtatatgtttgtgacatataaaa

SEQ ID NO: 2467 - DNA, 800 bp, Homo sapiens
  misc_feature (1)..(800): DMR18:38918901
ggtttgctgtttttacataggctcatatttcttggaggctttgttttttccttttcattctttttttttctaatcttgtcttcacactttatttcattaagttgatctttaatctctgatatcctttcttctgcttgattgatttggctattgatatttgtgtatgcttcacaaagttctcatgctgtgtttttcagctccatcaggccatttatgttcttctaaaaactgattattctagttggcaattcctctaaccttttatcaagcttcttagcttccttgcattggattagaacatgcttctttagctcagaggatttgttattacccaccttctgaagcctatttctgtcaattcgtcaaactcattctctgtccagttttgttcccttgctggcaaggagttgtaatcctttggaggagaatagacattctggtttttggaattttcagcctttttgtgctggtttatcctcatctttgtggatttatctatctttgatctttgctgttggtgaccttcggatgaagtttttgcgtggtcatcctttttgttgatgttgatgctattgctttctgtttgttagttttccttctaacagtcaggcccctcttctgcaaatctgctggagtttgctagggatccactccaaccctgtttgcctgggtatcaccagcagaggctgcagaacagcagagattgctgcctgctccttcctctggaaactttatcccagaggggcacctgccagatgccagccagagttctcctgtatgaggtgtctgtcgacccctgc

SEQ ID NO: 2468 - DNA, 200 bp, Homo sapiens
  misc_feature (1)..(200): DMR18:40536501
ttgataaggagatgtagagaaggatcacatattcatggtgctactttgggagaactgttatagatgaggttctatggtcaagggacagagtcatgggcagtggaggagggcgcatgaagttccagggtgcctgacaggaatagagaaagataaaggcagagttaagggtaaaaaggacatcaaagacacactttttgcat

SEQ ID NO: 2469 - DNA, 800 bp, Homo sapiens
  misc_feature (1)..(800): DMR18:41850201
tctatttaacaataaaaaatgaaaacaaacacaaagcatatattattgcctgtctagtgccaatcattatgctagtcatcgtgggggattcaaaaaacaaatacaacccaagtacttatcctcaagaagcttagcacctagtaaacctaattcactcattttatataagtccgtttcttctatctctaggaaacattgaggaaagaaagcacaattatttttacccatagcttctggatttcatacaagaatattgaagtctaaagcttcccgattaggctttaacaagaaaaaaaaacagaaagtagtgcctgaggactgtggagatcttatggccttgctctctgcctcagttagtccctcttttttctctagcttaacctcaaattatgactttgttcccccaccagtaatggggcctgcgtgacaatttttaaaagtacaaagacttctagaagtaaatttgtgtcttaaaatttacatatatatatttttttctttctttctttcttttcctatggttagccccacaaattcagctcaggaatttggaatatctttcaataggcagcaaataaagcaacacaaatgttcagtcaaatggtccaattttgaaagcagcaagtgacatttctgcttccttcaatgaaccatgcattttgtcttcattaaaagaatcgtttctttttattctatgtcagtatctcataataaggcatcaatagagtagtgcttatacactatggcttgcctgacctgtaaaacaacttctcgtgacctggatgtttccctttgtgaac

SEQ ID NO: 2470 - DNA, 900 bp, Homo sapiens
  misc_feature (1)..(900): DMR18:45460301
tcacccaatctacccaccaccacctccatgctgcagcaccctcccaatgaagtcttcctattcaggtgctatccccacatgtacacactagggctgcccagtccaccttgcagaagggttagcccagaatttgagattcaagggaccttcctgactgttcctgaaagcccttcatgatagaagaattttcctctgtgaaactcccaacttatgggaaaatagggttggcaggtctgaactgtaagagaagctaagaaagccttaataaagttcactctacccaacaacaaatgctacgtgctaaataaaggaaatatcactaacatttcatgtatcttaaattagtaataatgggccctaatgagttctgtactattaattccatttacaatccctctctccttggcaacttttcatgttcttcctcccctgcagttttaatgcgatacatgtaaatccattttgctttgtggcagaaaatattcaccctaagaagcacttaaaatgagtaggccttgaccttgggtgtctttaagattttattggcttctgcctcctgggtttcacagtgtgacttagaagctggaaggaaaaaaggctttgactcacctttatttgacttgtttggtgaagctgagtaggtgttgtatgaaccccttctcaatacctggtgtcctaagtccaggcacctgacccaacctttcctatgagatctcagctcccactccctcacaaaggccatctgaggccaagattattttctacaattccttttcattgccccccaaaactcactcctcccttccacccaatttgcccctattttctattttctactccacctttcccatgtccttcagtttcttacttttcccaatactgaaaattgcaggtcacagt

SEQ ID NO: 2471 - DNA, 200 bp, Homo sapiens
  misc_feature (1)..(200): DMR18:46969701
tggcagccttgacccagcagaggcccgccctgagcggcgtgagcgtggcctcttccgggttgctccccgggcacagcgggctcagggccctcgggcatcgggaggggagcggtgcgcgttggagggtcccgatgggggccggaatcagctggggccattctggggcgctttctctcggctctgggctcgcgactgggaga

SEQ ID NO: 2472 - DNA, 1400 bp, Homo sapiens
  misc_feature (1)..(1400): DMR18:47577201
tcattctggggtaatggataaagcctgtttatgagatgtcatttattccacaatagacagtaaataaaagccatttcaagcttgggttaaatcaaagcttgttcaggatttcagcagatttgcaaatcacctcggggaccttcatcagtcgcagttgctgttttcctccttgctattgattctctccctctctctgccaagcctctttctaaccttagctgccctgagcacctgactgatttggaaaaagacaactggcctggctagagacctagcgtgacattaaaaattccttccctcaatttggggaataaaggctttgaaaggcagcaagaaattgaggttatatcaacaaaagccagagtggcaaagggaaggaaaaaagccttagcaggacaataagatgcaaacctgaattggagaaagtgcctgaaaggcggtggtggcagcagccgcagctcctttgagtcacgtgcagattgtatttctttcacttcctgggaccctgtgtactggagggagggggaagagaagggaaggggcaccacctgaggtgtccctgcactaacccaggcttttgtcttgcacattcaaattcccgccctctgatctgacctgtaactcctatgaatcctggcctttgggacccacttaagtcccaggaagccgtgtggcctgtcccgtttccctggtccctcacagcgtgttatttgggatctttgacacgtttaatctctccttactcctgcgtgttctggagagtgagtattggcctcacaattgaaacgcaggttcctttgaggtttgggacagacttttaaagctagaagagtcagtcctggggtctctagaccaattttctcttcactgctggaatcccctgcataacatccccaaagacagcagcccctgccttcaattcacccagagtaggtactgcagatatgggagtctctcagcctgggaaatgtcttcatctattaagctcaagttttccatcctggaaccccagctcctcttcggatgccagcctgccttccagagggagagtgagtgagccgagtcctagccccttacggcagcattttcctaggtgaccttgggcctgtctcatctgcctcaaccacactccagccagagggctgatttggtttcagtttatcacttagccatgaaaatcagtaccccaacatttcattggttagcgtagaccagaaaagtgtgttcaaatatttgtgtcttaggatatttgtctcatcattccgattgaatatttactgagtaacagttttgtagaaataatattctaggtctgcgataggttatattattgttcaaaatatttactgccgcccccctccccaccgttagtctgccttatgtgggaggattatacgtcc

SEQ ID NO: 2473 - DNA, 500 bp, Homo sapiens
  misc_feature (1)..(500): DMR18:48327801
acccagatgtccatacatgaggttaaattaattgtctgattaatgaattatatccatattacagaaaaccatgttataaagaattacggccatatatataaacagtttttttaagatattaagtgaggccgggcgtagtgactcatgcctgtaaccccagcactttgggaggccgaggcgggcggatcacgaggtcaggagatcgagaccatcctggctaacacggtgaaaattagccgggcgtggtggcgggtgcctgtagtcccagctacttgggaggctgaagcaggagaatggcatgaacccgggaggtggagcttgcagtgagccgagattgcaccactgcactccagcctgggggacagagcgagactctgtctcaaaaaaaaaaaaaaaaaaagaaattaagtgaaaacacaagctgaagaacataatatttagtttgatcccatttttgtttaatatgtatctattttccagatccatggtaacagtagaga

SEQ ID NO: 2474 - DNA, 200 bp, Homo sapiens
  misc_feature (1)..(200): DMR18:48498501
ccatacaatatctttaataggccaaagcagtgggggagaagtcaaacaataaacttatatccagcaaaaatgtcatgcaaaaatgaaggaaagataaatatttttcagacaaaaactgaaaggattcattactagcagatcattaaaaatgtaaaaagaagttctacagaaagtagggatacaatagcaaattagaaatg

SEQ ID NO: 2475 - DNA, 2800 bp, Homo sapiens
  misc_feature (1)..(2800): DMR18:48727901
catttgccatctggacagtctgggactcttcaaaactagcaagtcctggatttttttttattgtgacagcccttcttttaacttgtctctctcttctcacattttacctagcaagaagaaaccaggcagcccctgcaggaccctggctaaaaacttcttccttagataatgcaagtcattaagtacattttctgcttttcacatatctgtaggagacaatgttgctaaacattttggggctacataataaaaatcctccttcctctaattcccaataatatatttttcacctcccttaaagcccccatcaccagtctcctcaaagtccatatttctaccagtggtctcttcatggcatttgaagttttcactaagaatcaccccagaatgcttctggctccggcccactgcccagtaccaaagccactctcacattgcagagtttcactatggcagcaccctacttccaagtacccaaagctgtattagttatctcttgctgtgtaacaaattactccccaaatttagcagcttaaaataagcacttatgatctcacacagtttatgacggtcaagcatccagaagctatatagctggggagttctggctcagggtctctcgtgagattgtggtcaggctgttggccaggattgcggtcatctgacacttgactcagatgggactggaagagccacttcccagctcacggatgtggttgctggcaggccttggctcctcactggctgttggctggaggcttcatttccttgcaacgtgggcctctctgtagggtgctcatgacagagtgagtggcctgtgaaggagggagggggagagtgagagagagagagagagagagagaaggaaagagagagataagctgttggatcttttgtaacctggtctcaaagcaacataccatcccttctgccatattccattggtcacagactaaccgtgatgtggcaagggactaaacaagagtttgagtgtcaggaggtggggaccactgggagccacctttatctgttttgagttccttcctgtaccattgctttttccccccactttaaatgatctagtgaaactcaccggtagctttgaatgggttgagggtttttgtgtgttctgattcaacttcaaacctctctacaaatgccctcctcatcctgtcctcccctctgcgcttccatccttcctgcccatggcccctctccatggtggggcatcagtgaagacgcttcctgcctggggaagatttgaagccaggggatgctgttgccagaactttggaacacccctcttacccagggggtccagcagatagttctgggaaaaggaaactttccaagatacacacccacgttccccccaccaccactaccacacacacagacacacactcacacatgtaattattttcccttaaactctataatctcaatgattataaaaagtttgggctttaattggaagcgtattgaaatccttgcatctgtcagacactgacagagaaggcttccttgcttaggtgggaaaataacccaaatattaacaacacaaataaagatggctcccccagcctttctcacagcagccgccagtggtctgggaggcagtaggatgagagctggcgtccccatgagaagagtgagatcagcgagactcagaaaggtgatgcgatttactccaggccttgcagagctgaggctggtcccagacatccagacgtctggattcttttccacagggttctggaatgttggtcctgtggtggaaaacacgtgctcctttttcacccacttggggatccgtggtgatctggagttgtcttcctgtctggggagggtggtcctgcctcgggtagaggaccagatatggtgggggttcagaatgctgtggagagaagtccctcagaaacggaaatattttggcaggcatgaggaaagattgtgagggagcacccagtggtgggacagtggcgatggacagaagaggactcctgttaatccgctctttccaatccacccagatgcccttccctgcattttgaggcatccctgggaggactgcctcaggaggcttcacctccaggtggagtctcaggtgaagtaatagtagccggctttgtccacagctgtgctgcccagcgcagtcaccacgagctgcctgtggtgatttacacccattacaattaaataaagccacaagttcagttctgcagtcatattggccacattcagggctagccacatgtggtgaagggcctccacagtgtgaggggcccccgaggtgtgaggggctcctgtggtgtgaggagcccccgaagtgtgaggggcctccgcggtgtgaggggcccccgcagtgtgagggcctcctggggtgtgaggggcccctgaggtgtgaggggcttctgcggtgtgaggggcccctgcggtgtgaggggctcctgctgtgtgaggggcccctgcggtgtgaggggctcctgctgtgtgaggggcttccacggtgtgtggggcccctgcgctgtgaggggcccctgtggtgtgaggggcttccgcggtgtgaggggcttccgcggtgtgaggggcttctgcggtgtgaggggcttctgcggtgtgaggggcccctgtggtgtgaggggcttctgctgtgtgaggggcttctgcggtgtgaggggcccctgtggtgtgaggggcttctgctgtgtgaggggctcctgcggtgtgaggggcccctgtggtgtgaggggcttctgcggtgtgaggggcttctgcggtgtgaggagcccctgaggtg

SEQ ID NO: 2476 - DNA, 2200 bp, Homo sapiens
  misc_feature (1)..(2200): DMR18:53316501
gatggtagcttaacaggaatagcattgaatctataaattacttttggcagtatggttattttcatgatattgattcttcctatccatgagcatggaatgtttttccatttgtttgtgtcctttcttatttccttgagcaatggtttgtagttctccttgaagacacccttcacatcccttgtaagttgtattcctaggtattttattctctttgtagcaattgtgaatgggagttcacttatggttaggctattatcggtgtataggaatgcttgtgatttttgcacattgattttgtatcctgagactttgctgacattgcttaacagcttaaggaaatttggggctgagatgatggggttttctaaatatacaattaggtcatctgcaaacagagaccatttgacttcctttcttcctatctgaataccctttatttctttctcttgcctgattgccctggccagaatttccaatactattttgaatagggatggtgagagagggcatccttgtcttgtgccggctttcaaagggaatgcttccagcttttgcccatgcagtatattggctgtgtgtctgtcataagtagctcatattattttgagatacgttccatcaatacctagtttattgaaagtttttagcatgaagaggtgttggattttatcaaaggccttttctgcatctatggaggtaatcatgtaggttttgtctttgtgacaaaatatctcaaaatattgagataatcatatggttctgtttatgtgatggattatgtttattgatttgcatatgttgtaccagccttgcatctcagggatgaagccaacttgattatggtgaataagctttttgatatactgctggattcggtttgccagtattttattgaggattttcacattgatgttcatcagggatatcggcttgaaatttactttttttgttgtgtctctgtcaggtgttggtatcaggatgatgctggcctcataaaatgagttagagaggagtccctctttttctgttgtttggatggtttcagaaggaatggtgccagctcatcgttttacctgtggtagaattcggctataaatccatctggtcccaggctttttttggttggtaggctatttctgcatcaattccagaacttgctattgttctactcagggattcgacttcttcctggtttagtcttgcagcgggcagggggcatatgtgtccaggaatttatccatttcttctagattttctagtttatttgcatagaggtgtttatagtattctctgatggtagtttgtatttctgtgggatcagtggtgatctcccctgtatcatcttttattgtgtctatttgattattctctcttttcttctttatttgtctggctagtggtctattttgttaatcttttcaaacaatcacctcctggattcattgatttttttgaagggttttttgtgtctctatctccttcatttctgctctgatcttagttatttcttgtcttctgctagcttttgaatttgtttactcttgcttctctagttcttttcattgtgatattagggtgtcgatttgagatctttcctgctttctcctgtgggtatttagtgctataaatttccctccaaacactgctttagctgggtcccagagattgtagtatgttgtgtctttgttctcattggtttcaaagaacttatcaatatctgccttaatttctttatttacccagtaggcattcaggaccaggttgttcagtttccatgtagttgtgtggttttgagtgagtttcttaatcctcagttctaatttggttgcactgtggtctaagagactatttgttatgattttcattcttttgcctttcctgaggagtttttttacctccaattatgtggtcaattttagaataagtgcgatgtggtgctaagaagaatgtatattctgttgatttggggtggagagttctgtagatgtctgttaggtcctcttggtccagagccgagttcaagtcctgaatagccttcttaattttctgtctcattgatctgtctaatattgacagtgggtgttaaagtctctcactattattgagtgggagtcgaagtctctttgtaggtccctaagaacttgctttatgaatctgggtgctcctgtattgggtgcatatacatttaggatagttagct

SEQ ID NO: 2477 - DNA, 200 bp, Homo sapiens
  misc_feature (1)..(200): DMR18:53619501
ttttatttttttatttttagtagagatggggtttcaccacgttagccaggatggtctcgatctcctgacctcgtgatccacccgcctcggcctctcaaagtgctgggattacaggcgtgagccaccgcgcccgaccggagaatcagatttcttggtggggacactaggtatggtcgttgctgctggggagtcattacatc

SEQ ID NO: 2478 - DNA, 1800 bp, Homo sapiens
  misc_feature (1)..(1800): DMR18:57970401
tcccagctgaagctcatgaaccagggagtgacacaggcatctccaccagatccaggtggaggagggagtaggcagcactcacactgcacccgggggtggaacagtagtgtgtgaagagaggaacatgaaattcattattcaccggaactgggccagcatttgaactgtggctagcctgttgcccaactccaggtggcgccactcacggggagttttatttccagaaaagcccttcccagaaaacagggcatgtacggtgccccctggagttgtgtgaggataccctactagtttggattcaacaaacaattgagatgagcatggtggcctagagacgatctctcttctgttggtgagtgggcgaactctccagaaccttccaatgcggcctcttgctcaacagtctttttgtggtgaggcagtagagaaatgaaagccatacaggtggagagcagagaccggaggcaggaaacatccctttaaggcggtgttctcagcctggctgcatactggaatcacctgggaagccttcaaaaatactggtgcctgcatgtgatgtaattggtctggggtggggttgggggcagcctggccagccaggatcttgacacactctcaggtgcaccagtgagcggctagcattacctccactgttccaagtctgctttagcaggcaccacaactcccacctaccccaaaccttgtcttgcaccagaagtgtttttactgtcacctgagtttatgctttttaatacttcatgctcattagtgaatctagtagctaatgagcactcctgtagcacaagttaatgctgtttgtccattttttgataggaagaaacccagcactgagaatgtaggtgtttatgtttgagatttacagcgtgcctttcttctttggtggttattttgattcttaaagtgaaaatgttctttctgcctattccctgaggacagagcaagaagataagaatttgagtactgtaaaatgatatggtaaacactgaaaaggactttgaaagttgaaattgttaaacattgaaatggattatcttaggaaagtgtggatcttattttgtagggacctttatttggtatagtttaagttgtgcatatttaaggcaagagaattaacaaaacaatcgcgtagatttttccaaatctgtgacttgaaggatgctacatacagcttccactgcccttcgcgtttctctccgaaacacatttagtaagcagaagtccgtatgcacgtgtgtgtgtattcatataggcctggatgtgcttttaatcccgcaagtatagccatctacagtgaattcagcatcttttcatcaggatgatgcctttacatcatgggtgtccaaccttttatatttcaaaacagattgacaaaatcctagcagggcacagtggttcatacctgtaatcccagcactttgggaggccgaggcaggcagctcacttgagctcaggagttcgagactagcctgggcaacatggcaaaacagtctctatcaaaaatacaaaaaattagctgggcatggtggcatgtgcctatggtcccagctactcgggaggctgaggtggaaggatcgcttgagcctgggaggtggaggttgcagtgagcagagatcgtgcaactgcacttcagcctgggtgacagagtgagaccccatctcaaggaaaaaaaaaaaaggaaaagaaaaacaaccaaaatcttgtacaaactgcacacaacagatacatttgagttaatttttatgtataataaaggcaaccagtaaatagattaaggctggt

SEQ ID NO: 2479 - DNA, 2500 bp, Homo sapiens
  misc_feature (1)..(2500): DMR18:58115801
taacttcaccttttgggcaaacttgacattatagatcttgaaataggattatttttcccttgctaagaggttagcaaaatcagtacagtgtgtctctttgacaggccctagaaagcactctacgtttgttaactttaaatttgggttggaaattgatgttattggaggagcaaggcgtgtttaggcctgatgatttttggatagcttgaccaaacccggtacagccaactttcccccaaaactactgtgtccttctcagtggttcctgtgcctgcacagggacccagcgcacaccccagtgtgcctctttgggctctggctaacttaggctgacatcctgatagaacgcagtgaccacctggtcatttgattacagcgcttcttccagacagcacgctcagaattgcgtttcttacttccagtcttcttgccctgtaagcattttctgtgagtcaccaaatcaaccacaaaatcatttaattttatggaagtggaaaatcagacttattaaaatactgtgtttttgttttaaagctcagaggtatagagatccatgaatttttttccatgccttctcataatgtggttttggtttagctgcggttcttccaggcgcagatgtcagccctctgcagatctgctgcatcagagtttatggcctgggtcttaggaatttgcaatttaaaataaccccttcaggtgcatctaatgcagcctaaatttggggccagctcatgggttgtaaactgtactgccctatacaatagtagcacagttctaagctcaagggactcaagggggtccagtaagtacagttcaccagagaaataacaaaagcatttgcagagggagaccagagcatcacctttgttagggcaaaggcttaacatagaggaatgtggcttctatgtccaggccagtgggcttcctaacacagaacatggaattaggcagacttaacatcccccatgcccaccctggtgagtgccagcatgggcttgagctgctcttcacactgatggtccatcctttggactgatctccttgtgaaggatacaatacagcaaggagcgggggcttggcttggcacagccagttctttacccaaactcctgccaacgctggcccttctttcttaccctggttggagtgtgtgagggtgggagaggcaggaggaatatgctggacagagcttcttccatctagaagggaatttcaggagtaagaaagcggcagctcttaacatacctgggagaaagcaagtgcttagtaaacagttgaggaatgaactaagaattttcagacagattttcctcttctggagcatttgcagaaccgcctctttgctcaagtgctttgttttttacagattcatttaaggtcatggttccagacactaatgtaaatcagcacatatattattgaagaagtagaatacctccaggcccagttgccttggagcaggaaaaacagttcatcctcattaccatccagaataatttatgttcaagataatacacaatcaatttactttttatcatattcgaatttgatttgtgtacacttttgagtttggatgtcagccacattgcttctgtgtgttaatctttatttacgggaataaatgggaagcagtcagccattttttattctttattggggaactgcattatagtggaaaaggtaaaattataagctaatgagaccagaggtctgtatgtatgaaaaccatcctcatcgcttcacagttgtctttgaaccagtttccctgggattgttcgaaatgtagcaaacgtggctcacggttaccctgacggggccagagcaatagggggaggtgtgggcacctgtatacatttgcgttgaaaaacgtacccgggctattctgaggtcctttcctgcccccagcctggtttctgggcctctctggagtctctctttctggcacttgtgttctggaatcgcttatcagcctggactccttcagcagcagctgccacagtgtctttgtagtcacactacacacctatatactccatgacatggagtgtatagaatgtttcccgtcttcctcgtcagtgctgccaggagaagcttcccctctcctaacctctggatagtggctggctctgctttattcaggcattgctttcattttttagaacagctgctccagtatgcttagtgtgaatgacagcccagcagaaagaatggacttgacactggagactgcaccactccacatttctttgtcccctcaagatgacttaactagctcccttcccttttccttcatgcaatagcctcagaagttcggctggcattgccaagttgttagagtgaaccttaacctgtgtatgactcagaattcacatctgctgtgtcagtgaacacacagatctctttgtgaacacatggttatcaagaggcacatgctcttacgtatcctgccggattctggtaaggcgctgcttgcgcagtaagcacttgtcaggtgctt

SEQ ID NO: 2480 - DNA, 100 bp, Homo sapiens
  misc_feature (1)..(100): DMR18:58675801
ttctctgctttgaactcctagattcacgtatgtaaacacttgtttgccatcttctcttgaatgactaagacacgtcttaaatataacatgtccaaaattt

SEQ ID NO: 2481 - DNA, 300 bp, Homo sapiens
  misc_feature (1)..(300): DMR18:59752001
aataggaaaaagactgacctcccctcaaacagagaaaattccatcagcagactgtctttggacccaagctacaacatcaagtcttccctggatctccagcctaccagactaccctgcagattgtggatttgtcagcctgtacagttgtgtgagatagttctttaaaatcagtatttttctgtgtctctctgtctccatctctctctctctgcatttcccacctcgtcctctcattacatatgctattgttcgtttctctggagaatcacgactaacatattctacctgttgtgatcttta

SEQ ID NO: 2482 - DNA, 1600 bp, Homo sapiens
  misc_feature (1)..(1600): DMR18:62454101
agggcttttgttctcacaacagtgaaaccaccaatgccaatgttgatgttgatggtgatgtccaatgtctgggctgaggaaggccacagcatctgtggccagtggtgtctcctccaggtcagttctgcaaaatgccttgggtcatttttcctgcttcaagagctcttgtccaaacctggttcttcaagcctctgtgtcactggcaccctttcaataagttctattttggtttaaatgaactagagttggtttctgaggcttgtagtaaagagtgctgaactaatagactggggaaatcaactgacttggttctgtacatagagtcatttctaaactagacaatttgggagatttccctgggcccttcaccaggagtcggggaagtgttgtggttccatctgtcaatggttgaagaatggtctatcaccaccatccagaccaatcagcctctcctctggatgctgccccttagtgacagctttctcccttttagggtcgactatcatgttcattctgtccagatttgatcattcaaaaacttaagcagagtgggtgcggtggctcacacctataatcccagcactttgggaggcggaacccttgagcctaggagttcaagaccagcctgggcagcatagtgagaccccatctctattaaaaatacaaaaattagccaggtgtggtggcttgtgcctgtagtttccagctactcagaaagttgaggagggaagattgcttaagcctgggaggtcgaagctgcagtgagcctcaatcacgcctctgcactgtagctgtgagacaaagtgagactctgtctcaataaataaagtgtacgtacaaaggaatattatgcagcagcaaaaatgagtgaacctgagctacatgttcaacatgaataagtttcatagatatccggtgggacaaaaaagtagtctgcaaaaggatgtatactgtatccttacaaaagctaaaaatcacgggaagcaatgctacattgtacctaggaatgcatgcatctgtaccgaagtataaagaaatacatgtcaatggtgagcactaaactatgaataattagtatttctgggaacaggggtgtgaaggtgaaatgtaataaacgggcacgaaggctcactttatttgtaaggttttatttaacaagctgggtggtgggtacgccttttcacatatctaaaatattttgtagtaaaaaattaatgaaacaaagggattaggaaagaggggtcagccagagaggttttcccaggtcacttaggggcgcctgtgggtctttcatgcactttttttttccaaaagtggccttgagatcaattagggcacggatttggccaacatttccaccagcattgctcagtttcctggtgcatgaaataatgattctgttgatactaaatatctgcctcctgcaacttatatggcatgatttgttgcgaggaaatgtgagcagctaacaatcagcttggttcatttcatctcttcctttcccatctccttcctgttatgggtttatttagggaaaaaaataggtaactgctttctggcaacgctttcttctccctgggttcttggccatgtactcact

SEQ ID NO: 2483 - DNA, 600 bp, Homo sapiens
  misc_feature (1)..(600): DMR18:62617401
tgtgcctagctgtgacttaattctaaactttgccagattattaatcaatttcttatcttcctcatatttggctcaagtaagagatggggcagtatctaaggaacctcagtggactcagccaggaaatctgcaaagaagcctcaggtatttgtacacacgtgttcataacagcattattcatcgtagtcaaaaggtagaaacaagccaatgccatggatggatgaacggataaagaaaatgtggtccatacatacagtagagtgtgagtcagcctttacaaagaaggggattctaaaatatagaaatacaattaaaatttttacaaagaaagggaaatctccatccgataacaacatggatgaaccttaaagatattatactaagtgaaataaaaggacaaatactgtatgattccacttctatgaggcatccaaaatagttaatttataatatatagagacagaaagcagaatgtgggttgccaggggctgggtggagagggaaaggggacttgtttaacgggcacagagttgcaggtttgcaagatgataagagttctggagacaggttgcacaaccacatgaatacaatggttagcat

SEQ ID NO: 2484 - DNA, 900 bp, Homo sapiens
  misc_feature (1)..(900): DMR18:63609901
aagaaatatttgccaattttaattttgctaaaacttttatcctttttttctagaggttttatagttttaactttcatattcaggcctatgagttattttgagttaatttttgtgaagtaagtgttggtgttaactgttttctatgcagatattcaattgttttagggtcatttgttgaaaagactccttattctaatgaattaattaccttggacactttgtgacatgtaaatatacaggctatatctgaattcttcgtttttctactaagctgtgtctatcattatctcgataccacactatccctgataatagtccttgtcctgaaatttaatttgtctgatatgaatgtaactactcaagatttcatatgttagtgttggcatggtattttctttttgcatgtttgatttttatcttaaaggtgccattacatttaaagtgaattttcacatagacatcatatatttggatgctatagtcacatcgtgaagacaggatagatcccctcacccacctaaaattggttgaatgttgtggctgatgatgctacacatgcaccaggagagtatgaagagatttattactcatgtaatgaggctttctggagagagcagagaagattcccaagcaggcttgagagagtcaggagggtcaactggctttggcttttattgtggttaggggctggggctggggctggggtgagggtttctgtaatggtcagggcttgcttggtttgaactacccgcaggtaccaagggaggaacctcagggctttcttcccaagcacatgtggatcagagggagagagagaaggtggggtttgatgctgtcagcagtcaaccatcaaaagtggagccaggctccattacattggatacttgctttgtaacgcag

SEQ ID NO: 2485 - DNA, 600 bp, Homo sapiens
  misc_feature (1)..(600): DMR18:64449301
aaagcttcatccccactgggaatgagtgtcatactcactctaggtcccaccagctttcctgcccaccaaagagagaacgagctacaccattggacaagcacttgtgaaagtcgcaggtctgagacacaggctcactaaaaagtgaaatttaattagaaggttacagaaaagttcccctctctcacacagtatcgccaaacagggttcaagtatggtaagtgtggattaaagaaagacacagactctgtttgaggagaagtaatgaaggaagactaaagtcaagaggtaaaacaaaaaccaaaaaatttataatacagaaagttgaaattgctgacacagctacatcaaacattaaagacagctcaactcctagtcaggttggtataaatcctcacactcaaggcctatttacttcagttctcaacactcaataagatgaccagatttcaacaaaaaatttagaaagaatgtcaacagacaagaaaaaaaaatagtctgcaaagataaaacaaacatcagaaacagactcagctataacatacattttggaagtattaggttgagatttaaaaataactatgattaatatgttaagggctt

SEQ ID NO: 2486 - DNA, 900 bp, Homo sapiens
  misc_feature (1)..(900): DMR18:64570401
tctcttggtagaggattatccaagacttctcctgcttccaggcatgcgtacttgcccagttggcttttactggcattcttggtgctggagaagcgttggagcaaatataaatgcatgacacattcttaaagcaggatgctgtccaagaaaggctaaaaagaaaaaagctgaaataaattaaagataaaacataggtaatacaaaaagagtacaacagcctacaataaaattccactgagaactaatggagcaaagcacatattgtatttattggtgatttggatatttttttttgaaatagttattttaagttcttgcatattatttcctaagatcacttctgcatgttttaatttgtagaaatgctttatatgttgcagttacaagcactttatcacttacatagattacaaatatcatttcatggtttcacctttacttttcagacttttccccatgccatttttgaaaaagttcctattttaagacagtctgatttatcagatcccctttttataattagttattttcatgtcctgcttaagaaaacgtttcctatcatgaattcatgagatattgtatattattaatagaagtctgttgcctatctttcatagttagctcttatagtatacttgtattgatgtttacatatattatagaaatcaagtttaacaatttttttcttctgtatttcttctaaaaaataaaaccccaaaatggtatacatgtgcagaacgtataggtttgttacataggtatgtgtgagccatggtggtttgctgcacctattgaaccctcctctacgttccctcccctcacctcccacaacccaacaggccgtggtgtgtcgctcccctgtctgtgtccatgtgttctcaatgttcggctcctacttat

SEQ ID NO: 2487 - DNA, 600 bp, Homo sapiens
  misc_feature (1)..(600): DMR18:65609101
aggattggttccaccagtaactcactatagagttgtagataaattaattttttttttagattcagtttcttcacttgtaaaatggagattatctaatttgcattgttattggaaggcttaaatgaaacaatatatatgaagcaactagtgtagtgcttagaataagaaaaagtcagcaaatagtcttttttttcagtttaaaaaaagttttagaagattccggccgggcccggtggctcatgcctgtaatcccagcactttgggaggccgaaatgggcagatcacgaggtcaggagatcgaaaccatcctggctaacacggtgaaaccccatttccactaaaaatacaaaaaattagccgggcgtggtagcgggcgcctgtagtcccatctactcgggaggctgaggcaggagaatggcgtgaacccgggaggcggagcttgcagtgagctgacatggcgccactgcactccagcctgggccacagggcgagactccgtctcaaaaaaaaagaagattccaaagtttttttttttttttttttccagccgtaacacatgacagtctgagctatgcattaaacatgagaaaataatataat

SEQ ID NO: 2488 - DNA, 1000 bp, Homo sapiens
  misc_feature (1)..(1000): DMR18:67174701
agaaaacaccacgatatatgtggaatgtaaacgattgaactcacaggagcagagagcagtgtggttttcaccacgggctgcaagatgggtgaatggggagatgttggtcacagcatacaaagtttcagttagataggaaagacaagtttttgggttctattgcacagtgtgatgattgtagttaataatagtgtattatatatttcagaattgctaagaaagtaaatttcaagtgatctaactacaaaaattgtatttgagatgatgaatatattaattgatttaattattccacattgtctacacatatcataatgtcactttgtaccacataaatatatacaattataatttgtcaatttacaataaaaatattatgaaataatataaatgaactctataaggtatattatttgtgtcgtgagttaagaaatcattaataactattttcagaatgacaaatgtcattatatgttgtaaaaaagataaatacgtgaaattatgaggttaagaaaagtttaaattgaaaagacaggaattcctgtggaattatggtgagcacctaaatctaaatctcttcataagtcctccaataaatatgtggataaagggacagtaagatatgcataactcacaatgaccaatgatgatgctactaggagatttaaaataccataagcttaacattatatgccaataaggagatgagggcatttctgaaaagtcctggaaaaagctgatatgagatttcttctctctacgtgaaccttctgccaatgttttgacaccatttagcaaagtccaggactcaatccagagattgggaaatattttttgtaaaggccagacagtgactattttaagatttaaacaaagtgacctgaggcctgcctgtaatctcaggtacttgggaggctgaggctagaggatcgcttaagcccaagaaagggagaccagcctgggcaagaaagtgagaactccatgtcaaaaaaataaaata

SEQ ID NO: 2489 - DNA, 1700 bp, Homo sapiens
  misc_feature (1)..(1700): DMR18:67378201
aggaatttgatttcttcctgattcagtcttggcaggctctttgtgcccagaaatttatccatttcttctagttttatagtttttgtgcatagaggtgtttgtggtagtctctgagggtttttttttttgtatttctgtgggtgtcaatgataatgttccctttgtcacttctagttgggtttgtttggatcttctctctcttttttttgaattagtctagctagcagtgtattttattaatgttttaaaaaattaactcatggatttattgatctttgtatttttttgtttgtttgtttctcaatgtccttcagttcagctctgattttagttatttcttgttttatgctagctttggggttagtttgctcttgtttctctcattcctctagttgtgctgttaggttgttaatttgagacctttccaactttttgaagtaggtgtttagtgctataaacttccctcttaacactgacttggtttgatcccagagattctggtatgttgtatctttgttctcattagtttcaaagaatttcttgatttctgcctcaatttcattattttcccaaaagtcattcaggagcaggtagttcaatttccatgtaatttttggtttgaggattttttaaattattgacttctattttttttgcactgtggtccaagagttgggttggtatcatttcaattattttgaatctgctgaggattattttatgtccaattgtgcagtcacttttagagtatgtgccatgtgatgatgttgtagaatgtgtattctgttgtcttggagtggagaattctgtagatctctattaggttcattgttgattcagatcctgaatacctttgttaattttctgcctcaatgatctgtttaacactgtcagtgggttgttgaagactcccactattactgtgtagaaatctaagtctctttgtaggcctctaagaacttgttttatgaatctgggttctctaatgctgagtgcatatatattgagaatagttaggccttcttgttgaacactttaccatatgtaatgcccttctttgtcattttttatctttgttgatttaaagtctgttttgcttgaatttgaaatagcaacccttgctttgttttccattagcttggtagagttttctccatccttttattttgaacccatggatgtcactgcgtgtgagatgggtctcctgaagacagcatgccattgggtgttgcttctttatctagtctgccactctgtgacttttaattgtggcattagcctgtttacatttaagggtaatattgatatgtgctctcatcatgttgttagcaagttattatgcagacttatttgtgtagttgctttatggtgtctatttattgtgtacttaagtatgtttttgtagtggctggtaatggtctttccttccatttatagtgctcctgttgggacctcttgtaaggcaggttcgatgattgcaaattcccttagcatttgcttgtctaaaaaggattctatttttccttcacatatgaagcttagttcggctagagattaaatttttggctggaaattcattagtttaagaatgctgaatataggcccccagtctcttctggcttgtagggtttctgctgaatggtttgctgttagcgtgatgggattccctttgtaggtgtggtcctgccccttttctctag

SEQ ID NO: 2490 - DNA, 2100 bp, Homo sapiens
  misc_feature (1)..(2100): DMR18:67949701
taggcacctcttcacaagctggcaggagagagagcctgtgaaggaggaactgtcaaactcttatagaaccgtgagatcttgtgagaactcgctcactatcacaagaacagcatggggaaaaccacctccatgatccaaccacctctcaccaggtccctcgcccaacactcagggattacgaggattacaatttgagatgagatttgggtgggaacacagagccaggccacatcaatcatcctattagattaaatatcatttcatggcaagatcatttcttaatatcagcagaaagtactgatgttgctgtgatttgaattgggccttcagcatcagagatcattaacttgttatactatttctatacaaactatataccttgtatcttacactagcaagctatattatctctacataataaattgggtatcataaacataattgtcaaagaaactatggcagatgaagaattagcaagacagaaggaagaatctacatgaaatctggcagatacagtttacttaggttttcctaagagatgcatcagtttgttagtgaagaaatactggaggtttatatcagaatcataccatatgaacattataattactgtaaatacaacattcttagtaaatctttgtgttgcattattactgattcttatattttctctggttattggtaagcttagctagctagatggagtgaaactttctttctactgcagtcaatctaaaaatccaaagtaggcaaattcatctttcataaatctcagtgaaattttacattacttctaattttctaaattaacacatgaagattaatttctctcttttactttttgcattggtgttgaggcacataattttgactatcttttctattgtgcctgcatgtttacatacacatgtgttcatgtacattgccatgttagaaaaattactgaattgttctgattggagtttatctttcatcttaacaacaacagcaacaacaaatgcatgctgaaaaaataatgaatgcattgcagcacattgttagcagtcgttattatgaagaaaatggtttgcctctgtctttcgcaaatagaacgtacaacacgctctggcccagccacactcagtatcatcccatagcggtgagtaccctgcagccagggagcacgtgatggaagcttcgtgctgctaatataaggactagtgctgtgatttgctctgacaggtctgtcattgctacatttctaaaagggtggccaagctggggtgctgtaaaatagaaacagaccttctaattcagtgatatttaatttaacaagaatagtaatttaggatatatatgtctcctgaggggggaaagaacatgaaacaactgaatttgcaggtatattattgaatgcaagactaaattataaagagtattaagatttcaaggatgaagcttttaactgcattaaatatatcaaataaaatttaagctataattatagttatgattatagcaaccatttcccgggtaatctacactgttccagatactctgcttttcacttccagtacacgatctactaaactcatgcactattaatcactcaatagtttaactgactaggttattgtgtgatatatggtaatcattcatgtaagatgctataaatagagccggagtgcaggtcgaaatgatgactgcccccgggttgtttattgtgaaagaaaatgatacatcattttgtaaaactgagttaaatatgattaagcagtgcagaatgtgatgcaggaacataaccgagaaacaatgataaactaggggggataagattagaatcccctcggtgtaaataaatgtgaaactaatatcaaacgagtgagttttgtgaggaaaaatggtgaggggaaagggtaaaagaattaaggagtagaggcaaataaaatatttttcatgcatcatccaggtagcatgtattgattgacaactcccagttgggaagtactaggaagtttccagggaattaaacaacttcagaatgggcaggacgagtagagagcagtaaggctggagacaccaagggtgaggtcacagcacaccttctcagacaggcatcta

SEQ ID NO: 2491 - DNA, 300 bp, Homo sapiens
  misc_feature (1)..(300): DMR18:69859401
tttaccatgtagtttaactaagagtactggcaaggtcataagaaataaatgccaaatattgatataatcatattttaatacaaatatttctgaaagagacatgagaagagtattttatgtggtgagtttggggagagaaagacatctaaatgaataatgaatgtctaaaattgaaaaaaaaagtattagtgtcataagcatgctattcagaaaagtgaacataaataaaataatgagttagaagtagtaaaatttgttgtctcaaggtaacaaaaatgaggaagggcaagggactactat

SEQ ID NO: 2492 - DNA, 1400 bp, Homo sapiens
  misc_feature (1)..(1400): DMR18:69979001
gaactctgagttactggactgaaactgaagtcatcggtggaaacatatgaattttaaaaatgtatttctagttctggttctagttccactaaaagggtctagaagtagcatagcccagtagcaacacccacacctacctacttcccataacttagttggtagatgccatctcctactaaacaagccagggctccttggggaaattctgattgcaatctggcatggggaaatacaagaccacagtgtaatcctttgtgggcatagacaaaaacaaagtccttgtgctacagccatcaccaaacaccgccctctcccagataacctgagtgacagctgcttctgctcaagctgcagctttagcgtcactctacttccctacctcctctcacacagcacctgatccagaacaaactcctcacctcctcagcaccccactatctcctaacacaagttaaatcctcacaaccaggccaggtgctgccccaccctttgccatcgagagagtgtgtgtgtgtgcatgtgtgtgcgcgcgcgcacgcactctccattgctgttgcaagcatcaaaaagcctaactttgttgtgcctgtggtcttgaccgaagagtgtaaagccttgtgtatgtacatgagctgagaggctttttgtccacaatcgtgctgaaactcattcctagaacctcctagaataatgcagccataacggcatttcagaaccttactccactctgcacctctctgccttgcatttctgctccttagaaacaacaactatcaaatcttttggctgtttttcttacgtcatgtttctaaataatatgctcattctgttacttctggatttatctattttatgcattattgcttgccttccttcagtatattatttcgctttcacagaccaaataaaaatttatgcaaactgagagcaagacaaaatgctgatttcctgattgttttgaaataaaaaaggcattttctcctaaacctgtttgaccctcatcttatactcttggggaaggttttactttgttcaaaaaatatttgattggtaattcacaatagatgaggtgtttccttttacacacatctacattcacttcctcctccccccatcttcccaatacatgttaattgtgatttttaaaatactgatcatcagtgttgacatcactatggctatataaatgctgatcatttctttcctgaacaatttctttagccaaacaccacctcttctcttctcaaacatcaaaaatcctcttgtttgggccatggcgtcctcacacaatgcaccacgctcttgatccctcatgaaaatatctcaacttggatttgcagtaatgtaccatagctggaagggtgtgattccctgcagacgacaaaggatcatgggcttcc

SEQ ID NO: 2493 - DNA, 1100 bp, Homo sapiens
  misc_feature (1)..(1100): DMR18:70138801
taataacatattttgaacataaatctcacttatctcctatatgcctgataatagacaagatgaagcacattcagatgcttgtacgtgactcttcagcacattcagatgattctacatgactcttgcaaaatatcaaaaagcagtggcctaagtctctaagaaaaaaaatagtacaaaatgttaccaagctctccattgagaaaaaaaaaaaaacagagaagacaggaaggacaaaactacatgaaacgtgttcatctaacaccttactaaattagaatcaaattaaaatgggtttttaaaaaccacattttatagaatgtaataaatttaggctcagagtcatttaggatggtctagtttctactcacacaggttgagcctatactcttaacacctgtcaaatgaaataatcagacaaaatgtaccaagatccaaaggtataagcaaaacaagaaagacgaaagagatattggaaagaagatagtaataacagcagctgcaactttctctctttatagataatagtttactgtctgagcaccagatgacatctacatcaaggcacaaagaacaatcagaggtttcagcttttctcagctctagcctccactcagcaacaggattagaaagcaatttccacaaaaatattaaacattttccatttacattagtagtgtattcactaataaatgctgttgttctaatagtaaaataaaaagtaaatgtgacttacaattaaagaagaaacacttaaaatttaagaacaatctaattattagcagattttcttttatttacctctgaataacacggtcaaaagagaagactgttgcgagagcgaaacacgcatgactggatcaccacataaaaccttcctcaagagtgtgaggcatggttgtaccaaacattctacaacctgggccaggaggaaaaacacagcttttcattttcaccaattatcaggtgagatcaaacagaccataatattatcttactctaaattttatgcgttttcatcaaaattatctgaaactaaaatgtaaataaatactaggaattactttccactgaaagtaagtttcgtatatacttctatcacc

SEQ ID NO: 2494 - DNA, 900 bp, Homo sapiens
  misc_feature (1)..(900): DMR18:70848101
ggagtttcatgtgtgacggaagcaccaactctcccctatcttcatatggccttcaccctgcaacagataaattataatgcacagggccttgctggtgcagcttgcttagtgcctgttccacgttcatctgccatcttctggcacgatcccttcctttaagctcctgtccacagtcttcagcttcttgtcttctgtctctaacagttgagctcctgtgagtagctattttctctttgctgcctactgaggccaagtggctggatacaaaggtggggtctcatgaatggacccgccactagtgttgcagttgtcagggtttcagttccctgccagggaaccaggaggctatcaccgaaccgcccaagagggagaaacgacactatccaactgctcatgtctccttaactcagccagggccaggactaaaacgcgaataacctttctctccatctatttttaggcacacatgaatgcgtgttgtgagttgcactcagacaaccattacctcattggagacagattcctggccctttcccttctccactaaaatataatttagaaggggaaacaggttttgtctgttttgttcactgcattgtccttgtgctgagaagggtacctggagtaagttaatgaatgaatggatgcactttagaagtaacattaaacaatatgctggcccgagttttgaaaagtgatatctcgtggtagctttccaaacattatatgctcatttataacaataaggcaatttttttcttgtgtaaaaaggtgtgcaaaaaacttatttacttaccaggaataacacttaacagtaccgatttgtcatcttcatctttttttttccaatgaaggaggaacaataaaacaagcatatggtgtatagtaagagggctgaaa

SEQ ID NO: 2495 - DNA, 1300 bp, Homo sapiens
  misc_feature (1)..(1300): DMR18:71068401
taacctcatgttaaatgcagggtaaaacttattcgaaggaagagataaagtaaaagtgtagctcaacaaacgtctgcaaatacatgtaccttcagttgagcataggtattactgtcctgccttagtcaagctaatgtgagccaagagtaaactgtgatcgtgactgctcagtagaaataatcgagggatgatgctgcctacatgccaaataaccactttactagcattttagcgcattataaatacccaggtgtggcattctggcagttcattggaaacaaggaatcagggctcaggagtgactcggaaatagagaatttggagacagaggtgaagtggtgtggttgaaataaagagaaaaatcataaaataaaaaaaggaatgcctataataagaactcagaagaaaaaagcatgcagaaagggaaatgtcagagaagtggaaagagaaaaattaggagaaagcaaagtcatagaaggccaaagagagcttcgaaaaggatgagagaaaatacagacctgaaggtcaaagtactatttttgagaaatattgttaacaactgatagaacatgaagatgaaagtaaaactttcatgcactaaaaacagaagcatatatacagaccataatggagttacatggggagttttcttagaaaccactatttttaaaaagcatgtcaaaaatgaaagataaataagaataccatttttaaaagtaacttaaatatgtcatcgcaaagtttataaaatcctgattatttgaaaataaatttaaaacttataaaagataacaatattttaaagttatttttagcacacataaaatactctataaaatgcataaaacctatatttattttaaacattctgttaatagattagagagagaaagctaaagtccctcatttctatttaattttaattaatttagtatggtattattaagttcctattattatatgtatgatgtatataatacaacttactatcaaatgtgagttgcatctctcatgctagaaatataagataaagaccatatagctgctgaataattttatgccctcaaggactacattttaaaaatgctgaaaaatcatcagtaatgtgctcaccaccctgtgttaagtggatgtctgccctttgtcttttatattgtttcatctgattgttttaagtggatcaggtcaaatattctaacttaaacaaaaatatcattaaaatctgtgaagaacactgtaaatagataattgctccagtttacacagagggaagaaaactggccttcaagcactggtaatc

SEQ ID NO: 2496 - DNA, 200 bp, Homo sapiens
  misc_feature (1)..(200): DMR18:71781901
tgtaagccaattaacatttactgagaacttacatttgatagaaatgcgtccagtcctttcttatacaagcagaatgatattctctcttctgaccctcaacagtcagatggagagatgtgaaaaatcattaaatattttatttaaaaactcatgatacaatttattctaatagaatttcatttaacgtgaataaaaagcat

SEQ ID NO: 2497 - DNA, 200 bp, Homo sapiens
  misc_feature (1)..(200): DMR18:74305501
gtcacttacactggggttcatttttcttgtatctagttgctcaagcaccatttgtttaaaaagactatctttccttcattgaattgcttttgcacctttgtcaaaaattagttcattgtactagtatgaagctatttctgagttctctgttctgttccattgatctatatatctatccttccccaatatcatctagtctt

SEQ ID NO: 2498 - DNA, 1200 bp, Homo sapiens
  misc_feature (1)..(1200): DMR18:75989101
tctggttccacctctcttaagtttccttctccagaagcagaccctgagaaaaaaaaaacaaaaaacaaaagatggagcgaatgtagcttatggaggaggtggtttcaggaaggaaagtgagacagagaagggaaggcagccagggaaagtgtcatcaataagcacgtttctgctatgggcgaccagtgctcagctgtgctagaaacccctgggaggggttgagaacacgttccagagccttgcatgggggatgaggagtcttcttctttactctccagttcccagacatcgttgaatgagagctgctcccacaggtgccggctcccaacacatgaatcctgccctgtgtgcagacagagtgtgccatagaaagccctcaggtgggagcttcagcaggacgcagtctgcatgcccagaactcagagtgccatgggcataggggtgggtattgtagacactgatggcacctgctgctggagagaggaagggaactcccactgcatagcctaactgggggaaggcttgtggggttttgtttcttactccctttcttcattaactttgctttggcttccttttaggatctaacctcttcacgatgtgtgcagtcctggtggatctcactagtcagttgccctgcccacccatccctcaagagcaagccatgggacccaagcgaggccaatggaaccctctcctagtgggttggatcttgaacaaaatgtgcaaggatttaaaaaaatggctgggcctcatttgttttaatagtagtttcttaatccagtctatcattgttggacatttgggttggttccaagtctttgctattgtaagtagtgtcacaataaacatacatgtgcatgtgtctttatagcagcatgatttatattcctttgggtatatacccagtaatgggatggctgggtcaaatggatacaccatggaatactatgcagccataaaaaatgatgagttcatgtcctttgtagggacatggatgaagctggaaaccatcattctcagcaaactatcgcaaggacaaaaaaccaaacactgcatcttctcactcataggtgggaattgaacaatgagaacacttggacacaggaagggatacatcacacaccggggcctgttgtggggtggggggaggagggagggaaagcattaggagatacacctaatgtaaatgatgagtta

SEQ ID NO: 2499 - DNA, 2800 bp, Homo sapiens
  misc_feature (1)..(2800): DMR18:76003301
ggaatacaaacattacaaacatttggttgcaatgtttttaattagctccccccaaaaaaaatcccaatatgaacaaaaatagaatgtaaatggcaaacccaaaggttgtgaaaacttttgacaaattgaattatttccttaatatataaaagattttacaaatcaaagtccagggaaataaaaaaatataacaattgaaaaaataatgattaccaaattgcatctttttttatttaattttattttaagttccagacatgcaggtttgttacataggtaaacgtgtgccattgtgccatggtggtttgctgcacctaccaacccatcacctaggtactaagccccacatgcgttagctatttctccctcccactgtgccccaaaccagcccaatgtgtattgttctcctgcctgtgtccatgtgttctcattgttcgactcctagttataagtgataacatgcggtgtttggttttctgttcctgtgtttgtttgcagaggttaacagcttccagctccatccatgttcctggaaaggacatgatctcattcctttttatggctgcgtagtattctatggtgtacatgtaccacctagaaccagaaataccatttgactcagcaatcccataactgggtatatacccaaaggaataaaaatcattttattataaaaagacatgcacggtacattcattgcaacactattcacaatagcaaagacatggaatcaacctaaatgcccatcaatgataggccaaatggcatcttttttaaaattggtattttcaaaacaaatctagagtgttacaattatcaaaatataattaatttgaaattaaacaaatattacatgcatgtatgcatacatacacatatagatatatatgcatgtttacatatatatatttaatattatacaaagtttatatcttatctataaccagggaccgcagagttttactaaatgacaagggtaaaaattatcgtaattgataaagaaaagtccaaaagtgatacagttcaaaaagaaaatatcctaaatgtgtcctgactattgctgaggtgtcagggaggagttggtgtcagatggtacaacaggattgtattttctcctgttgagtaattgtgttgctggtggaccctgatccccctgggtgccagcttaggtgacacattggaatcacaacccaaaaagagtgactccatcaagctgtgggtccccatgtccaggcagcagagataagataccacaatgagctgctagaaagtgaaatccttagactgtccatgcgatgccaagtggccagtttgtccctttactctgcacccatggcctccatgaggacagaggctgcacattctcattttgccttctcaccaggaggatcctggattccctgacattctgggcccagagccttgcaccctctcttgtttcccattgtgtgcattgaatattccttttttcttttcttttcttttctttttctttttgtgagacagagtgtctcactctgtcacccaggctggaatgcagtggtgcaatgtcagctcacttcaacctccgcctcctgggctctggcaattctcctgcctcagcctcccgagtatctaggattgcaggcacctgccaccacacccagctaatttttgtatttttagtagagatggggtttcaccatgttggccaggctggtctcgaactcctgacctcaagtgatcctcctgccttggcttcccaaagtgctggattacaggcgtgagccaccatgcccggtgcattgaatatttcaatatcatctctgccaagcatgaaacttcctctccagttgtttttacctattttaccaattaaaaaatgctatgttttcaaacatgtccctatgtaaacacaagccaaaatatatcttggtccttttaagtatcctatgcttatataaagtttttattttaaaaatagaagatgaatggaaatagagaaacagtcatttgttctcctataaacacaagaactggatagtattttattgtataatggtaggaataaaataatttactcatcacggtcatcgtagcctttcagacgaacacttctgcactccaggtttttccacatggctccttctcttcgtgtcttatcttttccttcatgttccttcctttcaccttccacacctgttagaaatgacacgggaggcgcttggcagcccggactcttatgagacaccacacaggtgcctttagagaaacttccatggagtctgaaagcactgtaaacaaggagcagccgcgagatgggagaaagttgttcgtctgtcagtttgtacctgactgcacatcataatcgaacccagattttagaaataactcttggtggcgccggctgtctgcaacgcagcccatttcctgctgctgctggagtctcagctcttgcccatttccctctctctctctctctggaggctgcctggtcgcacgtcagccaggagacttacaggtgcgggctggcctcccgtgagcctttagatatgtcatgcgagtaggcaaagctccctccacggagatctgccaggccgtggggtttgtgacacatgacacacagtttcagccggtctggtcacaatcgtaacatgcttcctcttccccctagctgtcccctcttcttctcttcataactgccaggctggcccacagctgacatcacacgcaggaggaggacagatttcagctgtcagctcaacagtgcagaaacgtgctcaccaaaaagaagaagaaaaaaagaactgtaaacttttag

SEQ ID NO: 2500 - DNA, 1100 bp, Homo sapiens
  misc_feature (1)..(1100): DMR18:76391701
aacctgtactaaaataccaaattagaaacagggacttccacaggtgcccaggcaaccaggtggaaaactgcagacacagaggtctcagtcatcccatggccccagcctcattgtgtgctttggggataaggctgttgtctcagcctcgccctgaaggccggagaccccatcagacagagacaggcagagccagcaggaggaggccgggcaggtaggcccacagcagagaggccacgagagcaggggaacgtgacactcaaagggagagggacggcgaggcaaacaacaccacggtcctctctgccgcggctcacaacgccgcccctggcttccggggagcacacagctgaagaagagcctcatttccgccaccagcgacgccagtcaaaccaggaagccagcgcagactcggccactggaccaaagaaacacagtacggccaagggacaggccttacatccagggctcagggtggccttttcctcactgtccccatgaaaatgagaagacttcacagaaagggaaagaagcatcttttgacatagggaaaaagactctaggttcctaaatagatgtaagaccacagggagtgtcactaataacaggttatagttttacaatcttctggtcagccacaggctctagggttggcaaacggggctcttcacccagaaggtgacattcacagggctcaaaatatgtcccaggcaacacaagtcacccaggaagtagcgcagcctgggaagccctttgcatgttcaagagcagagaccaggaaagcaggaggccagctgggaaggcaggtgggaaggtaggtggccaggtgggggaaaggtggatgggaaggcaggtggccacgtgggggaaaggtggatgggaaggcaggtggccgggtgggggaagggcaggtgggaagacaagtggccaggtggagggagggcaggcgggaaggcaggtgaccaggtgggggaaaggtggatgggaaggcaggtgaccaggtgggggaaaggtggatgggaaggcaggtgaccaggtgggggaaaggtggatgggaaggcaggtgaccaggtgggggaaaggtggatgggaaggcaggtggc

SEQ ID NO: 2501 - DNA, 400 bp, Homo sapiens
  misc_feature (1)..(400): DMR18:77258301
ggatctagcatttgaagaagggatgaagattttctttttcgttttcacagcctctgacccttaacagctactgaacagatgtcagatctttgttgatgtatttaattgcctccttgtttgcacagaataaataaatgtggtggtggtggtggtgatgatggtggtggtattggtggtggtgatggtggtgggtggtagtggtggtgatgatggtgatcattgtggtgatggtggcgattgtggtggtgatggtggtggtcatagtgggggtggtggtggtcatggtggtgatggtggtggtcatggtggtgatggtggtggtggtgatggtggtgatggtggtggtggtcatagtggtggtggtggtggtcatggtggtgatggtgatggtggtggtggt

SEQ ID NO: 2502 - DNA, 2400 bp, Homo sapiens
  misc_feature (1)..(2400): DMR18:77588501
aagctttagaaactatgtgagagcagtcctatttctgttgtaaattaaatataggcgattaagcttgagatgtttttcccatggtatatgtcttttcaccaatgtgttatttaaaatatgattgtgtctttggatttcagttcccaaacaggacctgttcctttgaagatcatccgcaccgtgaagatgcccagttcaatgggtgtggctgggatcacgtattgcaataacacaaacaaaaggagtttaaacatgtaatattcctatcacctgaattattaagataaaatgtcatttaactggaaggattcctggatattgtaagagaacacgcaggtctagttcattcgattgttcacacacagtcccgtgcaccgtgtgtcagcataggcgaatgggaagtttgcgcgttgagtggggtgtgaatggagaatttgcccaagagacttgaccagccgtgttccctgctgtcatctcagtatctataacagcatcggcacatggcaagcattccattgaatgaatggatgactccacagaaagatatcaaaagcacaaagagtctttagtggccaatggggtttttatcgaatccgcttaaggactttgtcaggagcagagaagttccaaggagttttgtttggctcatggcttttctgtagacctcttgttggccctcgaggtgcagctgatatttgtgaaggtaagcatggtaggtggaattctgagagggcccccaaggcgccccagccctgaattaaacgccctgtgtggtgcccgccctgagtgcaggtgggggctgtgaccgtgacggtgcatggctcccatggttacactgcgggctgcagtaagaattctttgctgggcttgaagagaccaccggccttacagggacctgctgtggaggccacagggcagggactcgaggttgtcctccaggagctgagggcggtaggcagcctacagctgtcgaggacatggaaactcagccctacggccacaggcaatggctctgctgatgccaatgagcctggaagaggaccctgagcctcagatgggagggacactcgagccagccccttgacttcagcccggtgagacccaggaggacctagcagctcacactcagcctcctgacccagggaagctgggaactgatcagtgtgttgttgtaaacactaaatttgcagtcatttgttatgcagcaaaagggaaaaaaaatagacgtatccggatatgttcaacttaaaaagacgcccacctacccggatacacctggggtggtgggtactgtctgtccctggggacgcaagaagcccacactctccagtctccctgtagttatatcagggctcagtgtcagtgagttaaggccagtggacttcaagaccttgcccttaaaaatatccctcaacggccgggcatgttggctcacgcctgtaatcccagcactttgggaggccgaggcaggcagatcacccgaggtcaggagtttgagaccagcctggccaacatgatgaaaccccgtctctactaaaaatacaaaaaattagccgctgggtgtggtggcgggagcctgtagtcccagctactcgggaggctgaggcaggagaatggtgtgaacctgggagacggagcttgcagtgagccgagatcgcaccactgcactccagcctaggcgacagagtgagacttcatctcaaaaaaataaaaataaaaataaaactctagtctcccatgcagccagctctgcgtgaattactcctcattgcaatccctgtgtcttgagaaatcagctctgtctagaaagcatgcgaggtgaacccactgggcagttacaaattatgggaaaatatacaggaaaagatgagggaacacaggcagcatgacggaaataaggagacctcaggaaagttgcgatccagcttatcagagcctgcagatgcttaaggttttatttctttactgtgaatgcctttgcataacagagagctcggagaaagaatttaccaggaggacatggttgatatcctgtctcataatgctaacttgtacttgcccagccttcaaaaatagatatttgggaggagaaggtgattgttcgttcaacagagttttcctgagtgtagattgaacctgtttttatagctgtattggggagaaaatgatgccctaaagtggaaacctcagaagcaaagtctccctctgacattctcctgccctcctgtctcggatcctcattctcccccaaggccaccatagaaactagaatccatcttttccaaagtgggtcatagaaaacagaacctcttttctcaaagccagtcataaaacctacaataattactctaatgtctccctgcctttctgggtaagagttggccttaaataaactatctg

SEQ ID NO: 2503 - DNA, 1000 bp, Homo sapiens
  misc_feature (1)..(1000): DMR18:77782501
catttttttagccatcactctctgtctcctcctccccattgccctttgtcatcgctcatctacttttttcttgttatggcttctgtgttctggacatttcatgtaaatggaatcatacaacatgtggcttttgagtctactttctttcactccaaattttcaaggatcatccatattgcagcacacatcagtcattcatcccctttcaccgtggatgggattacacagtgtgatacgccagcctgtgtttacatccgtcaggtcatggatacttggatggtttgcattttggactgttgtcagtaatgctgttgtaaaccttcatgcacaagcttttgtgtggacgtgtgctttcatttctctcaggtgcatgcctagaagtagaattgctggggacatgggaacacagtgtttcatatttagagagatgccaaaccgttttcaaagtagctgcaccattttacatttccaccagcaatgcatgaaaagttctaagttacttttttcttttgtttcattgacttcttttgacaatcaaatgttctgtgcgttgaatattcaactaatttagcagtcgcttgtctaaaataatgctggtgaaaatagaccatgtaattcttcaagatcccatttgaaccccatggtgatggttagatttacacacgtaggactacaggatgcatggatggcaaacagcaagagaacctttaaaatccagcacctgcctactatttgaggttctgcacataatgttcttgagcttctgaaatatttaatactgtaggtgggtcatgggagtctgattacaggaaacagctttccatttatttagtggtcactgttcctgaaaaaaaaaaatcccaagaaaggccatcaaagtccatttcatgggtcttttgaggttccagatattacatttaaaacttgactaaatggtccttttgaattacacttccctgagaatgcacaggaggtgacactttttcaggtacgacatcta

SEQ ID NO: 2504 - DNA, 2700 bp, Homo sapiens
  misc_feature (1)..(2700): DMR18:77872601
tcaaatacatcagctgggcacactggctcatgcctgtaatcccagcagtttgggaggccatggtgtacagatcacctgagttcaggagttcaagactggcctggccaacatggtgaaactttgtctctactaaaaatacaaaaaacaaaattagctgggcatggtggtgggggcctgtaatcccagctactcaggaggctgaggtaggagaattgcttgaatccgataggcagaggtttcagtgagccgagattgcaccattgcagtgagccgagatcgcgccattgcactccagcctgagtgacaagagcaaggctccatctcagaaataaataaatacatatatacatagattattctccctgcccttagagttgattagtgaatatatatccgttttcaaaatcatcaaaaaatctttcactattatcttcagttacccagattcaaatatccctgatgtcttaaagtaaaatcccaaatgcctgttttccaaagaaccaatgtcttcaatatactctgctgtttagtgtgttaagtaatttaggtgaaccagaaacatgttccatcctgagaacccaagaatctttgtttacagttattttaatccccagtgaattatttaaaatagctatgcatgttattatattgttttcatcaagggcatttgagcatgttatgacattaattatagtctgtgtaacgtaaattgaatacaacagaaacggtgtattctgttgggcagaaacatgcatagtgggtgtgatggttaataccaggtgtcaccttgatgggactgaaggatgcctagatggttggtaaggtatcgtctctgggtgtgtctgatgagactgaaggaagcccagatggctgataaagaatcgtttctgggtgtgtctgacgggacccaatgatgcctagatggctggtagagtattgtttctcagtgtgtctgggagggtgttgccagagaagatggacatttgagccagtggactaggagagaaaggcccaccctcgatgtgggtgggcaccatccaatcgactgccagcgcagctagaacacagcaggcaggagagggtgggatgagcagtttgctgaacctcctggcttccttctttctctccctgtgtcagatgctcgcttctgctcctcctgcccttggacatcaggccccagacgcttcgacctttggactttgggacttgcaccagtggcttttctgtgggctctcgggcctttggccacagactggaggctatgctgtaagcttccctgcttttgaggcttttggactcagactgagccactgctggcttctctcttccccagcttacagacggtgttgtgatcatctgagccatttctcccagacactccctttcccacgtgcatattagttctgtccctctggacaaccctgactacttcggtgcgttcttcagtgacttgcagtttttatctggtgttagatatgtgtcttaaaaatactactactattgacacagtggtgttgctttaaaataatttttgtagcatcattcaccactatttatttaatgggagactgctttaacaaaagtaaaccatcccttttccatattcaaaggagtagctacattcagtggtttggtgaaattcagagggatgtgtctacttagaggtgttctccaccaaaaagaaaagctggttctctgttccgaggttcagagaaaagcggagggaaaaacaaagaactgttaataaaattccagttgaagggatcacacttttatgtacttgtagggagtgtatcgacttttaatcctgaaagaggagaatggttttgattcttttggtcagatttataagataagtttctttctaaaaatctgtcttgagcataaaaatagccccctctgtctatttttaaagaaaaagccatgacgtgaatacatcacgttttccttagagtttgtaaaaacactttgatttctgcttatgatggaaaaaaaatcagaggcattccagagccccctcctccctaaacctgatggaaatgtgaaattactgatggtgtcaacattcaaggcacagccgagcgatgagtgtggtctgccgacctctaggctccaggcaccgtcagcggacggggcgtagcttcttcgcgaaggcggcactagctgccacttaaagcaccaaaataagtcataggaattttatgtcagtatttgtgtggaagatggaaaagtctacatgatttaaaaatacattttcctttaaaataaactgaacaggattccaaaattaagcaagttcaacaatggcaatataatgaaattgattcttgtaaaacagcttaatgtctttcagtaaatgacttactctagggtgttaataagaccagtgttcatgatacaatacttgacccagacagacctccccacgcagtatagctctgttcatctgcccgcccctcctccatccacccgcccagcctccacctctccaccctcctcctccgtctgccctcccacccccaaacatccatccccatccctccacctccccacagccctctctgtgcccatttttccagccaagaactgaccatccaccatccactcatccctccttcccccaaacacccctccacccaacctccaccctccacaatccaccacccattgctcgagtgtctactgagtaataagcagatt

SEQ ID NO: 2505 - DNA, 3200 bp, Homo sapiens
  misc_feature (1)..(3200): DMR18:78122501
aagtgtgtatcctgatattttaaaaaaatacattggtctagtctattttaagaagtctatttgtccaaatgaaacatttaaaaatgggaattttagggaactttttgaattctaagtaatgacttttattgtgggctagcctcacctttctattacatttagtcatttgctagtacttcatccacttaatcatgtcttttaacatttgcttatacggcaaaataaaatagtcataaaaacaaggtagccctcacttttcgtcacttctgtattcattactacaatgaaattatgtggtcacgtaattatgtcatttattatgctgtattatttcaatgcacctaaaagatgggagggaatatcttattctgggaaagagaacaggaaataagacataaaataaacgatgtgtatggctaggagtgaaaacggaattactgcagggagaagaatgatctctggctcattctcttggagcaggaaatggcaccaactagctatggcataaaacactctggctcttcaacaatgaattttcctggttttcaggaagcataattttggtatctaaagcaaatcatgttcgtcatttccacagaagttactcagtgtccagaaaaatcttccctttagcccagcgtggataaaccatgatctcagacgggtctctggagaggggccgtggacccagctctcctgagcgcctgcagcagggagcactgaaccgtctcccccacgcccggctcaaaccaggccactcaccgcgacctgtgccccacccagaaagtgagaaattagaactttattctccctgggccgacactccgcctccctccccttacaacagaggggacgagaggcagcgccaagcccggctttctggctttctcctccggcaggcctgagtctcagtggtgctggcctgaggtcaggagcacctgcggtcccagcctcagcctcccagcagctgggatgctggcctggaggggagagagggagaggacaccagcactttaacccccggaccaggcctccaagcagactctatcagcttgagctcgcccttgagaagctgatgttagggttaggacgagacatgagcagagctatttgctgcggaaacatcaactaaatatttaccccatgaatccctccttctctggggtgatcaccccgggaccagatccccaccaaggggcagggcactgaccccacacagatgtcccctggtgacccctgggctccaccttctgctcagccacctggctgcactttcctgctcctccccgcccagggctggggccgaaggcacctggtcccacatctctagctccagtttctgccatgtcgtgaccctgcctttactcctccaaactctgtctgcactgccttgtacatcggaggcatctctcccaggtgcctgcacctctccgtggggcacccgctctctggagtcctcaccttttcctgcctcctgctctctgccaggacagcctgggggtcgcagggagggggtttgccctgcagcacggaaagggtgggccaggggctgcgagccgcagggcctccaggaagggcaggtgcgggactgggatgcagagggtagtggcctggactctacacgaaatggagtgtgggctcccagcaggccaccgccctggcgtcatcctcaaagagccacgtggcaaaggcagtgagaggcacacagttcccattgtgcccagagatgtcccaaagcacagtgatgacagggattcccagagaaggcagtgggatttgctgagcatggagagtggtgaggcctggggctttgtgttggagaaacatcgccttcacatatgaggaccagacccgtgtcccggcccagctttcccgacctgaccccagcaggagcagatggcattttctgtgggtccaggaggtgagaaaggcggcaggggataaacaggaacgcatgccacctgctgcgaggaaaacagtgccgagcaggacgcgcagaagccagaatgtgtgggccggtattgtggccccaggccgagtggcctctccatgacacagatgtcagggtttaactcagacctgccaagtggagcctccgcagcaggcccaggaaacccagagaccggccctgttccccgtgaggattcaggcaccacgggctggaaagcacactccctcggaacgtctcagggacagtcatcaggaccagattctggaaggacgcagggtggtctctcccatctttgtttcgactcctctctcctctctgatcgacacccctgaggcagcgctgcggtgagtcagttccgcagggagcctgtcttcaccccggacccccaggtctctggctaagagcacgtgatttatagacacagttccccacccccacaggtgtggggaggctccctgcaagctccccctcactggagggtaaacgagcttgggagcagccctgaggaggtgtggcagggtcctggtttagccctccagctgccttggcacttgtgtttctgcgaggacttgatcctctttgttaagtcagcctcagcaggaccaaggtgaaggccggctcttccagcaggagggcggccagcccagcccaaaccctgcctccccaccctgaattctggtcatgtccactcacttactgttcgttagattgatttaaaaagtaaaaccacacttgcgatttttcttcttttatagagtgaaggaaaaacctctgtcagaaactaacttaggggaaccaaggttcactatcatgagggtctctgaatgtttgtgaagaaaacactgctgttatcaaagagataagcattggctaggaataattacactttaaaaactctcaaattggcagcattcataaaaaggcccccagagaatgttttccagatgtagaaagtggagacctaaacacacaattcctcaagtgttttcatggataaagaaatgcacaagtaatgggaaataacaccagccatcagctgtgggagtgtggggggagtagaggtttgtgcatgcagtcatgtgcctgtgtgtgtgtcagtacatgtgtgtgcatgttcctgggaatgtgactgtgagcatatgtgcatgcatgggcacgtgtgtgtgtctctgtgtaagtgcacatgtgtgtgcaaaagtgtgcatgtacctttgaatgtgaaagtgtgtgtgcacgtgtgtgcctgtgt

SEQ ID NO: 2506 - DNA, 1500 bp, Homo sapiens
  misc_feature (1)..(1500): DMR18:78388601
aatgaattccagatgacagaaacggtgctagtgaacatgcagacccacttagaacccatggcaaacattcgaaaccgtaacaatgagtgagtacttagctgaaaaccactgagaaaaatgagacccggcactgcatctaacggatcctcctcttcctccctctctccctcctccccttctcttcacttcctccaccttgtccttctctgtcaacccaatttagccacttaagtcttctctttctccttctgtttcaaatgtatttctccccaagactttcatctcagcgcctctcttctctttataaaagatatgttttggacttcttagctcaggcattttatgcaaatgcctacccaaatctatttctccccaaatctattgctattgttagcttaggcattttgtgcaaatgcctccccaaatctattgctccctctctaattttgaccaagcataaagtgagcatttccacttagtggtagcgggtgccactatgagccacatccaggtccagccacgttctgtgcatgccggtctcgcccatgatgggggcctcagagcagagctgatggtgctgcttccacatcttccacccacgccaagggccacgtccttcctgctttggacaacgcatcccacagccacgttcttttcccagctccctgcccatcatcattctatccttttcatctttttgatgtgatttcaagaacccctccactcttatagactctctttagacccctgaagtaatttttttttttttgagacggagtctcactctgtcacccaggctggtgtgcagtggtgtgaccttggctcactgcaagctccgcctcccgggttcaccccactctcctgcctcagcctcctgagtagctgggaccacaggagcccgccaccatgcccgggtaatttttttgtatttttagtagagacggtttcacagtgttagccaggatggtctcgatctcctgacttcgtgatccgccagctcggcctcccaaagtgctgtgattacagacgtgagccaccgcgcccagcctagactcctgaagtcacttttgaaaacccctgcaagattgcacttcacagagatttagtgagacctccccatatatggctcctgcatgctcagacatctccccattgactcgaaaattaacacggagacacccatcaggattcaggatgccgcacacattgggctaagcctcgcagtcacccaggaggcccgtgctcacctctgccacccacggatctgctcaatcctcccggaagacgctccactcttgcccctcagcactcctttgctccctgcacctgctgtgcctgcagagccccaaggccctccccactcccactcggctcatgccctgtctcacctgcctgctcttctccatcctccagggctgaggggcagaggacatacattctgcacggagcaggcagaggcctccgtgtgaccctcatcccaaagccgaaagctccatgacc

SEQ ID NO: 2507 - DNA, 200 bp, Homo sapiens
  misc_feature (1)..(200): DMR18:78500201
tgacgaaaactctcacaccacccaagagcagccttgctactgcccggctgccacctccaccccacggtgcatgcagaagctcgtccactccaggcagagtgtaccctggcctccaggacaaaccagttatttactcaggccctgcttggagggacggggtctggagggtcagctcggggtgagcacaggccagtcgtgtg

SEQ ID NO: 2508 - DNA, 400 bp, Homo sapiens
  misc_feature (1)..(400): DMR18:78659701
tcctttctccctcagctcctggcacatctgcagaccacccatgggctctcctccacgagacctgcccgccgggcacccaccatcccccagctgtccctgggaactccccacagccaccctggggcatgggctttgtctgccctgtcaccagatgttggcaggcatgggctggaccaccagcccctccggcagacggctggatgccgggacttccgacgtggaggctgcgaggctgcggctggccaggtggtggcactgctgccctgaggcatctgtgcccacttccacacaggctcctcgaaggagcccaccaggcagccccgcgtccctggacgtcaccctcctgccctcaccactccacctgtggtgtgcggcacccactgtcgtcctcagggcctgg

SEQ ID NO: 2509 - DNA, 2100 bp, Homo sapiens
  misc_feature (1)..(2100): DMR18:78963601
cttcttagtctgctttctgctgctataacagaccagacagattgggtaatttatacggaaaagaagctcctttggctcatggttctggaggctgggaagtccaagaggccgcgtggcacctggtgaggatcatcccatggtgggcagcattgcatggtgagagcacacgacccagagagaaaacgggggccaaacttatcctgtatccagagcccacgcccacagtcactagacctctccctataatggcgttaatccattcacgacggaggagtcctcactgcctaatcacctctgaaagggtccaccttttaatactgttacaattaagttttcaacacatgaacttggggacacgttgaaaccacagtattaggcaatgatttgtcatctgtcactatagttcaatcatttcatcaagcagtttccttttgaaatataatcactcccttaataatcgcttctatgagtcttatatttagttcttggaacaacaaaatgctgagttgaatcaccattatactgcaacattaaaatgagtttcagagaaaacacaaagttctatttagactttaatgacaaagagataatgtcctttaacaaaggttttgctgttattattcttgccatgatagttttaagtctgttccttgaaactaatttttcaaatgagtgcacattttctaaaagcattataatttttaataacttgaaaagtctgtgaccatcataacaaaaatcgattttaagaattcacggtttgggcttaggtgcatgtgtgttcattccagatcaccacagactggaagtgcctgttagctttcctctcattgctgtttttcatttacaaaaatgtttaagtcatctacaaaaacagagcatttggtacttttgccttcaaaaacacacatatattctgggactggtgaaaacattaatgtttgatcaaatatgtaattaaagaggtaactgtaaaaacggttatataattctagaactaagaaatacattcttacacagagaggcttgatcaaattcttataaaggggaaagctcattgaagtcaagttgatggtagggtaaaaagtttaaaagttttttttaatttaaaaaaaaggtgggggagcttagtttaaatgaaggctccaccacccctttcactggaggacggtcacttcccaggacccatagtccacaccagccacaggagtggctcctggggagcaaaaaaaagggaaaggcctgccctgtccagagcccgcaagtcagcgcccacatcctgacatggccgacctgcaggctgcaccagcgccgccttctccggagccgtcggtgggacccaggctgcccctccacccggcctgcaccagcactgccttctctgggagccgtcggtggcacccaggctgcccctccacccggcctgcaccagcgccgccttctccggagccgtcggtggcacccaggctgcccctccacccggcctgcaccagcgccgccttctccggagccgtcggtgggatccaggctgcccctccacccagcctgcaccagcgccgccttctccggagccgtcggtgggatccaggctgcccctccacccggcctgcaccagcactgccttctccggagccgtcggtgggacccaggctgcccccccacccggcctgcaccagcgccgccttctctgggagccatcggtggcacccaggcggcccctccacctggctccaggctcagctcctccactcccagattccgaggccaggtcccgtccctctgctcccgcccaccccctgcctgggaccaacccgctccctctcctctcgcactcccacgacctctcagatccagctgtccctagccgagtctccgccgctcactggcccaaccccgactgaggccctccagtgtcccctccacgtgacctcccgtgttccgttctcccacgtggcgcagatcaaaagctccgggccagccttcatccccctgccctcccaccatgctgcagacacacccccgcactgtctgcttctcaaaccgtctgaaagccacacagctgaagggtttctctccactcgaaggagtcacaactcttca

SEQ ID NO: 2510 - DNA, 200 bp, Homo sapiens
  misc_feature (1)..(200): DMR19:740601
cagatgacgctgttcaggccagggcctcaccccctgtggcccacagctgggctcagaggtcgttcagccctgggctcactgcccaatcattcatccactccagaaagctgcctgaaagctgagccgggcaccaggtacccagctgggctctggagggaaatccggaggtagattcagcttctgtccttgccgggtggcaa

SEQ ID NO: 2511 - DNA, 1600 bp, Homo sapiens
  misc_feature (1)..(1600): DMR19:756801
atggaccctttgccctttgggggactggaggctgttcctctccctaggtgctctgacttgatggccctcatttccttctcctccctcagtaagcccagaggtctccaccccacgggaggaaggctgaggccaagaccccggaagagatggaccgcgtgaccagataccccatcctgggcatccctcaggcacaccgtggcaccggcctggtgctggatggagacaccagctacacataccatctggtgtgcatgggccccgaggccagcggctggggccaggatgagccgcagacatggcccactgaccacagggcccagcagggcgtgcagaggcagggggtgtcctacagcgtgcatgcctacactggccagccgtccccacgggggctccactcggagaacagggaggatgagggttggcaggtttaccgcctgggcgccagggatgcccaccagggacgtccaacatgggcactccgcccagaggacggggaggacaaggagatgaagacctaccgcctggatgctggggacgctgaccccaggaggctgtgtgacctggagcgggagcgctgggccgtcatccagggccaggcagtcaggaagagcagcaccgtggccacgctccagggcactcctgaccacggagaccccaggacccccggcccacctcggtccacgcccctggaggagaacgtggttgacagggagcagattgacttcctggcagcgagacagcagttcctgagtctggagcaggcgaacaagggggcccctcatagctccccggccagggggacccctgcaggcacaaccccaggggccagccaggcccccaaggccttcaacaagccccacctggccaacgggcacgtggttcccatcaagccccaggtgaagggggtggtcagggaagagaacaaggtgcgtgctgtgcccacctgggccagtgtccaagttgtggatgaccctggctccttggcctcagtggagtccccggggacccccaaggagacgcccatcgagcgggagatccgtctggctcaggagcgtgaggcagacctgcgagagcagagggggcttcggcaggcaaccgaccaccaggagctggtggaaatccccaccaggccgctgctgaccaagctgagcctgatcacagccccacggcgggagagagggcgcccgtccctctacgtgcagcgggacatagtacaggagacacagcgtgaggaagaccaccggcgggagggcctgcacgtgggccgggcgtccacacccgactgggtctcggagggtccccagcccggactccggagagccctcagctcagattccatcctcagcccggccccagatgcccgtgcggccgacccagctccagaagtgaggaaggtgaaccgcatcccacctgatgcctaccagccgtacctgagccccgggaccccccagctagaattctcagccttcggagcattcggcaagcccagcagtctctccacagcggaggccaaggctgcgacttcaccaaaggccacgatgtccccgaggcatctctcagaatcctctggaaaacccctgagcacaaagcaagaggcatc

SEQ ID NO: 2512 - DNA, 1600 bp, Homo sapiens
  misc_feature (1)..(1600): DMR19:841001
accccaccatggctcaccggccccccagccctgccctggcgtccgtgctgctggccttgctgctgagcggtgagtgagccacgtgcccatccatccagcctccaggccccggtggattgtggggaaatatccaccacgaggtccatccaaagcccttctggcacagctggggaaactgaggcagggtcaggggagactccactcactgctcgggaccaacgcttgcaggggtggggaggacaagggcaagggggagccctggccatttgactcagttgcctatctgtaaaacgggcaaaacccagcccttccctcctgaggagctgttttgggaattagctagtaacaggcgaattcctggacagcacccagccttcagcaaatgctcagtgaatatgcatgaatgaatgaatgagtgaatgaatgagtgagtgagtgaatgagtgaacaaatgaatgagtgaatgaatcaatgagtgagtgaatgaatgagtgaatgagtgaatgagtgaacgaatgaatgagtgaatgaatcaatgagtgagtgaatgaatgagtgaatgagtgaatgaatgagtgaatgagtgaatgagtgaacgaatgaatgagtgaatgaatgaatgagtgagtgagtgaaagggtcgaggagttagtgatgctggaatcaggggaagaagagagcatgggccccctcaggtccctatcctgagggtgattttctttttctttttcttttttttttttttgagacggagtctcgccctgtcgcccaggctggagtgcagtggcgcgatctcggctcactgcaagctcagcctcccgggttcacgcctttctcctgcctcagcctcccgagtagctgggactacaggcgcccaccaccatgcctggataattttttgtaatttttgtagagacggggtttcaaggtgttagccaggatggtctcgatctcctgacttcgtgatccgcctgcctcagcctcccaaagtgctgggattacaggcgtgagccaccgcgcctggccctttttttttcttttttgaaacggaatcttgctctgtcgcccaggctggagtgcagtggtgcaatctcagtttactgcagcctcagcctcctggggtcaaatgattctcctgcctccgcctcttgagtagctgggattacaagcacacaccaccacacctggctagtttttgtatttttagtagagatggggtttcaccacgttggtcaggctggtctcgaactcctgacctgagggggattttcaatgcctcagtttgttcatctgcaaaatgggtctctttgttggctgatttttttttttttttttgcttctttttttttattttgttttgttttgtttttttgagatggggtctcactcaggcatgagccactgcgcccaggattttttttttttttttttttttttgagacagaatctcactctgttgcccaggctggagtgcagtggtgtgatctcggctcactgcaacctgtgcctcctgggttcaagcgattctcctgcctcagcctcccaggcagctgagattacaggtgcgaaccaccacacctggctaatttttttttttttt

SEQ ID NO: 2513 - DNA, 1400 bp, Homo sapiens
  misc_feature (1)..(1400): DMR19:1396101
accctgactccaccccaccagccccttcatccgtcgaagtccaggcctcatcagggacgtgcattcattcagcaaacgtcccatcttcctgtgttcagcgccagatgccgccggtgctgggacctcgctctgcaggcccaccctgcatgcctgctgcacaccagggacagttctggggatcggcagttatgacgggccaggctgggatggggcccgggagactggggcgggggtggggaagaggcacccagcccagccgggtcaagcagcctggaagcaggacatgctggggtggggacagggcgtcagccagcggaacagcagccctgggccagagtgcagagcacaggagccggccttctctcagggcaaggaggtcagtggagggggcgagcaggacggccccaggaagatgggcgggctgcacacatgtggatgcagggggcaaagtgggaggcatggggtgaccagctgggcacaagggcacagacaggcaggacccgggatgttcctggggctgggcaggtggggctgcccctgcaatgggcccagcaggggcgatgcctcctgagaggaaaccacatctggaaatgggaggcttggggaacggggctgtcagcagccacgcccctcctggggcgggaggaggggagctcagggtgtgctggggcgggcagagaagtgggttcctgcctggggtgggcaaagatccttgtcccacccacaccccggccgtggtgctgccaccccctgagaccctgacctagttacccccttccctgaccccactgcaaagggtcaggtggctttcatctgaggaagggacatcgggcatcagctggagatgtctgctatgggcaagacagtggggggggcggggcggatcctggggccgctcagaaacctggaggggagtcacccacttttcctgtgtccatgggatgggcgggaggtgagggagcagccgctggaagtaacagtcgcacgctcactgccgactggccaagcccagcgccggcgtttacttcacctcagggaccctgcagtgggcagcagtgaccctcacagagaagctgggaaagctgctggtgacacacagctgggatcagccctgggctggtgggacccctcacagagaagccgggaaagcttctggtgacacacagctgggatcagcccagggctggtgcgacaccctggactcccggccaggaaggcacggaggagggcatgggtgtggccgggccggggtgggggctcagcctttggtcaccaggggcgtgatcatctgtgggaaggcgtagtagcggcagtcggccggtgggaccagcgccatcacctccgtacggatgttctccctccggaagccggcctccagcagcgcgggcacctgcgtctcc

SEQ ID NO: 2514 - DNA, 2700 bp, Homo sapiens
  misc_feature (1)..(2700): DMR19:1743801
cgggttcacgccattctcctgcctcagcctcccgagtagctgggactacaggtgcccgccaccatacccggctaattgttgtatttttagtagagacggggtttcaccatgttggccaggctggtctcaaactcctgacctcaggtgatccgcccacctcagcctcccaaagtgctgggattacaggtgtcagccactgcaccccgcctgacgattcttaaagaagcaaaatccaggcccccaccccagcccggccccacaccagctggctcccaggaggcctgggctctgcctcgagcaccccattcactcctctcctgcagccccagcatttctacccattgagaggaatcaaaaaacagccccagccccaggaaggtggaaggaacagaaaaccagggctggtgcccacagggaaactggaacaaacccataaaactgaggctggtgaaccccaggccacctaactccaactgcacgggagccccggtaccatctccccagaatccgcccctcaggcctcagtttgctcacctgtgaagtggggcctgcaccgcccagctcaagggactatgagggaatctgcgcagatggggacaaagcagcctcccttcgctttgtgcaaacctctcctccttgccccggcctcctcctggcctccagagcagagctggcccccgactccagctcccccaggatcgatgggaggatcaattccagcagcagcaccgggctgtggggggaggggggctcctctgggaagcctccagttcccctcctccctccccctcctttcctcccccctccccttcctcccctttctcaccctcctcccatctcccctctgcttcctccccctcctcctcttcctccccctcctccccatcccttcttcctcatccttttccctcacctccccctccctcctcctcttcccccctccagcttctgtcctctgagcctggcccaggattccttgcccctcccccaccggtccaccctggctgtttatggggtgggcagaggctggtggccgcccttgtcacagcctttcctgagcactgtcagatgtcctcaagggtgcactgtgtgtgttttatccccattccacagatggggaaactgaggctccagaagggtccctgatgtgggaaatgaaggcggggctgggatttgagtctggaacccaccctcaaccccaaaggggagaagccccggacaccacgcaggcgctttgggaatgaggcacccttggcggatggactgggcgggctggggtcagaggtcacctgccctgcccagcagccgcatggagatcacccagtagccctcaggagtcggggctcccacttgtgaaccgggtacgccacccctggagatgcagagctggctggacacgcacctacctccatcttctattcccctctgagagctgggggcgggtggttctttggtttttctccagggaatgagaggcgccctctctggggggtaagagccttggatctgcctgtttcctcatcggtaaaagcaaggggtcaacaggatgaccccatccctccccaatccccttctcttcttgccggcgctatgacccctggggagcccctgcccccaggcctggcagcccccagggaccctcctactggggcctgccacggtggggggacaatgtttcccattttctgcggagccccccaactctcacctccaggcagaggtgaggtgatgaggggctggaggaggctccccctccaattccatccttgggaaatgccaccctctcacctcctggcgcccagggagttcagtaataacagaaacgttttgtttggttttgcttaaagcgagcaggagggagagcgcgaagccaacggctcctgcccagcccaattgtggggatttaccatggaggcgattactgagcggaactgcgggcggctctgctcggagggtcccgtgcttgttagggaggtgggagaaacagcaattacagctgttagcaccgaggggaggggaggagggggaaggagaaacggaggaagcagaggagaggggagcagggagaaggaagaaggaagagtggatgggggagggagaggaggctggaagggaggaggggagggctggaaggagaagggggagtagaaggaaggaaagggaggagccaggagggagactaggaatgggaggaggggggaagagggagaggaggagggggaaggaggggggaagggggaaggaaagtagaggagggggtaggaggagtgggaagaatggggaaggatggggaggagggagaagggggagtagaagggggaaggatggggagggaggggagaggaggagtgggaagaatggggaaggatggggaggaggggcaggaagggggaggagggagaggaggaggaggatggaggaggagtggggaggaagagggagggtgaggaggagggagaggaggaaggaaatggaggaggagtggggaggaagggggaggatgggggaggagggagaggaggagggagatggaggaggagggggaggaagggggaggatggggaggagggagaggaggaggaggatggaggaggagggggaggacgaggtaggaggatcctcacccttcaagagcatcaagttttcctccccagtgggagaagctgaggcccagagagaagtctctgctctgacacccca

SEQ ID NO: 2515 - DNA, 2500 bp, Homo sapiens
  misc_feature (1)..(2500): DMR19:2372301
tggtttgcctgggggcattctcacatatctctcaaacccggccagtaacaccctcctacgttgctttaaaaaaaaaataaatgatgcctcttcttgtcaagggcttcctcccacctcaaggtcacctgtcaacctccatgcccactcttgtttctcgaaatgggctatcttccctccttctacctgtgtatttcattctctcccacccccagtctttggaaaaaaagataataaaactctagaagatatttttactctgagattagcagtgtgaaggaccttccagaaccttctctctctgcctttctctgaattaaaacgctcgcttgtctgagaccggctgtctccattgcatctgagtgataagagaaagattcattgaaacaggcaggttttatttttggtctgtccagcactaaatgattttcttttggctgacttatttttttttaactctaaacagactttgcagcttagtaagaatttatttcaatttagaaatatgggtgttctaaactttttttaaattaaaaaaatttattttttcctgagacaaagtcttgctctatcacccatgctggagtgcagtggcacaatcatagttcacttcagccttgacctcgtggggacaagtgatcttcctgcctcagcctccaaagtagctggaaccacaggcgtgcaccaccacccctggctaattatttttattttttgtggagatgggggtctcgccatgttgctcaggctggtctcaacccctggcctcaagtgatcctccctccttggcctcccaaggtgctgggattacaggcatgagccactgcgcccagccagaaacttgggtttaaaatggactttgcattataatgagatgggtaattcacccaggatgaatccagccttcagcttttgctttctttttttatttttatatatttattgatttttgagacacagtctcactctgtcgcccaggccggagtgcaatggagcaatctgggctcacttcaacctctgcctcccgggttcaagtgattctcatgcctcagcctcccaagtagctgggattacaggcacgccaccacacttggctaattttttgtatttttagtagagatagggttttgtgatgttggccaggctggtctcaaacgcctggcctcaagggatcctcccactttggcctcccaaagtgctgggattacaggcgtgtaccaccatgcccagctaatttttgcatttttagtagagacggggtttcgccgtgttggccagggtggtctcgaactcctgacctcaggtgatccacccacctcggcctcccaaagtgctgggattacaggcatgcaccaccatgcccagctaatattcgtatttttagtagagacggggtttcgccatgttggccaggctggtctcgaactcctggcctcaagcgatccacccgcctcagcctcttaaggcgctgggattacaggcatgagccacagtgcccggccaacttttgctttctttgccgtacacgtggcctagggaggttgcagcttggaggttttcagccaactttttgcgaaactaatacacaccatgctgatttattctttaggaaacttgtcagcttttcactgaagcaacaaatgcttttgtctgtaccaactatttgcaaagtgctttacagggagatctgagcaaggcagagaggtaaagaaggctcgtgtctatccttgaggagttgagaggagtctagaagtttctgtacattgggcaaatctgggcagtgctttataacattttcccgagctacagagctctgacccctccgcggcttcactgcttttcaagctattacatcagcaccaaagattcctttttcttgtattcacggtgacaaggagaggctcaaagtcctgcctgtccattaatttcatgctgatttctctcaacaatctttttttttttttttttttttttttttttttttttttaaagaggtagggcgcggtggctcacgcctgtaatccccgcactttgggaggccgaggccggtggatcacctgaggtcaggagttcgagaccaccctgaccaatatggtgaaaccccgtctctactaaaaaatacaaaaattagctgggtgtggtggtgggcgcctgtagtcccagctacttgggagactgaggctagaggattgcttgaacctgggaggcggaggttgcagtgagccgagatcgcgccactgcactccagcctggagacagagcgagactccgtctcaaaaaaagaaaaaaaagaaaacaaaaacacccctcaaaaacagggtctttgtttgagaccctgttggaggcctctgcgttgctctggttgtctctggggagcccctaaccaggcttggaagaggttcttggaggaaggtttctcctctgaccaccggctggctctggccccttacccacgagcctctgtggccttggtgaggtgggcgccgagtgcatacggtggata

SEQ ID NO: 2516 - DNA, 1900 bp, Homo sapiens
  misc_feature (1)..(1900): DMR19:2518101
caccaccccccatgcccactgcgctgggctggtgagccccaagatcgtcgccgttgaggttctgtggttctggtcgccgcgttggagctggggatgtaaaacctcaggcgggactgggagtggggacgggtcaaatcctggctccccccgaggcccgacattcaaaggggcggtgggggcccctcctcaacatcaaacagggcaggatgagtcaccgccctccgcccgggctgggggctggcacccactcgtaaaaggaaaaccacttcaaccagggctttctctcttttcagcccgaaggaatgctttgaatgctcaggtctgtcctcagcagtcagattgctggaacattcagacacctcgtgggaggcagacccctcccctactggttggatcccggccagcagcagcgtgatggggtctgggagggctcagagctgcgctggagggagactcaccggccgatcagaaccacctgtgccacctggccagcagggacgactctgtccgcctccccgctgggagcaaagcaagggccggtcaccccttcctaataaattcccgtggccaataatgacaagctggtgacaggtgctggagagctgagttctgagtggatacgtggggtgatggctgattttatgggtgcactagggcgggccatggtgccccagggtttggttaaatgtttttttgtttttgttttttttctgagatggagtctcaccctgtcgcttggggttggagggcagtggcgcaatctcagctcactgcaacctctgcctctcgggttcaagctattctcctgactcagtctcccaagtagctgggactataggagcctgccaccacgcctggctaatttttttgtaattttagtagagatggggtttcaccatattggccaggctggtctcgaactcctgaccttgtgatccgcccacctcagcctcccaaagtgctgcgattccaggcgtgagtcaccgtgcctggccagttaaatgtttttttagatgttgctgtgaaggttgtttttttcttgtttcttttttttttttttttttttttgagatagagtctcgctctgttccccaggctggagtgcaatggtgcgatctcggctcactgcaacctccacctcccaggttcaagtgattctcctgcctcagcctcccaaatagctgggattacaggcatgcaccaccatacccgggtaatcttttttttgtatttttaggagagacggggtttcaccatgttggccaggctggtctcgaacccctgacctcaggtgatctgcccacctcagcttcccaaagtgctggaattataagtgtgagtcaccgcgctcagcctgttttttattttgtagagatggggtcttgctatgttgttgcccaggctggaattgaacgcctgacctcaagtgatcctcctgcctcggcctcccaatgtgctgggattacagctgtgagccactgtgcctcacatgcaaaattttttttttttttttgatgtgattcacatttaaatccgtagacttcaagcacagcaggtgaccgtctgtaatgcagatgggcctcatctaatcagttgaagggcttaagagaaaaagcctggggtccttccaggaggagggaactctgcctccaggtggccttggggttccagctgcagcaccaactcttccctgggtctccagcctgctggcctacactgcagatttcagagcttgccttaaaataaatctcgacaaggcgcagcctcaagtgtgatccttgtaaaaaacttcaaacgggccaggcatggtggctcacgcctggaatcccaggactttgggaggccgaggcaggcggatcacctgaagttaggagttcaagaccagcctgggcaacatggc

SEQ ID NO: 2517 - DNA, 5300 bp, Homo sapiens
  misc_feature (1)..(5300): DMR19:2905701
gttgcagtgagctgagattgcgccactgcactccagcctgggtgacagagcaagactctgtctcaaaaaaaaaaaaaaaagaattgtccctctaccttgttctgtaggaaacctgattgttcttagacatttgcctttcatttcagttcttagaagtagtttttcataaattcaaaaacaaggaaaaaaaatgaggctggttttggatgtaatggaattgtattcaaaccccagatcggtctgagagatctgctgacgtggtggcattgtttccttcctcagtccgcgtgccatctctcatttctctctcctttgatgtcattcggtagtgttttataattgttccatgatgattgttttatatccttcattagatataaaattcctctgttgcccaggctggagtgcagtgatgcaatcatggctcactgcagcctcaaactcctgcactcaagcgatcttcggcctcagcctcctgagtagctgggactgcagattcatgccaccacacccagctaattaaaaaaaatttttatagagctggggtcttgctgtgttgcccaggctggtctcaaattcctgggctcaagcgatcctcccgcctcagcctcccaaagtgctgggaggaaaggcgtgagccatggtgcccggccctgagtgtgaattttaaaaggctaatgcccaagcagtgtatcttagtaaggacaagcaggcctgaaggagctttggaacactgaagacagagcaagaaaaatatgccagtggggctcagatcaagtattttagcaatgttgattattctgttgtcattgtggagttgattgcacagccttgcccgtctacccatatgcaagaagcagcccctttgccgaaaccgccccctccctagctggccagtaaagaaacagtccaaagccacacggtcatctgctgcgtggctaccagggagcgtcgtcctggctgtgaagcttccagacagtcactgtctgctgtgtgtggttagaaggacttggacatccgtgttgtgtgcgcacaagactgtcctcgggggatgggccagagggcccaggtttgcctcggtgccataagtatcatttccatttcaggaaggaggttctgtggacccgtgagtgtcaccaccggaggcatcagggcagctccgggcagagaggcacagggcccgtgggagcctcggtctctagtgggctgtggaggccacatgggaggacagtgtcttgcaccagatccccatggccaattcaccgccactgggactggtctgagattccctgaggctggagcggaggcttcgagaacctctccagaggagtccaggcggggggtgggggcggggcagagtggaatcctgtcgtcattgcattttccacagaatctagaacctctgttgtcccacaagtaggctgatttctgatcgcacagatgggtcagagtaaaacctgtaagtgaggaatacgttctctccaaaacccagatagacctaaaaagtgttaggcttgctctggccgtgggtgttgataaatgaggtatgcttcctgcctgggctgctgcttcaaataacgaccagaaatatgaacaaagtggtggggacttgagtctagtggggtgcagcagctcgccccacctggaaagttctgcagcaggcccacgagcctgtccccgtgcctggctcttccgaaagcgcaaattaaatctctaaaatctaaaaccctctcatccccaaggccagctaccctcttgcacttcataatgtcataggaattatttttcccccatcctacacttcagtaggattttcattatcgttatgtcacagagagatccattcttttccattggttcgtttgtccatccttctgctaatactgtactggcaagattgacagctcttaaatccttgccctgtgttaggtaagccttcaccctgttcttcggaaagttttggctatttttagactctttttctctgttagatttggaaagtagttttgtcaagtcctaaaaagtctcattaagagaggatctcactctgttgcccagactggagtacagtggtgtgatcacagctcactgaaacctcctgggctcaagtgatcctgctgcctcagcctccctagtagctaggactgcaggcacatgccatcatgcctggctaattttaaaaataataaaaaaattgtagactgtgtctccttatgtcgcccagggtggtctcaaattcctggcctcaagcagtcttcctgcctcggcctcccaaaatgctgggattatgggcatgaaccacctcacagggccccaatcaagatttgtttctccattgaaatcctttactagccttaagtacttatttaactttggattttcccatagtatgtatcagcttttaaaaattaattttccaactattatgaagtagaaacataatgcaatttcttggaatcttggtaaaaatctttttctaggattatctctttgttctgttggggttttatgtgcataattcttagaaatttgcaaaaagacaagtttatgttttataattcttgtatatttcctggtggtgctggaactagtataacgttgactagaggtgaggtcatgggcgtcttcattttgtgtatcatgtttttgaggaagacagtgaacttcacattctttatgttttttaaaaaccagctttactgacatatagaacgtacagccatttaacgtgcacatttcattgttgttgttatttttttggtttttttttttttttttgagacggagtcttgctctgtcgcccaggctggagtgcagtagcgcgcactcgaagctccgcctccccagtagctgggactacaggcacccgtcaccacgcccggctaattttttgcatttttagtagagatagctaggatgatctcgacctcctgacctcgtgatccgccctcctcggcctcccaaagtgctgggatgacaggtgtgagccactgcgcccggccattggtttttacagtcacagaatcctgcaaccaagaccacagtcaacttgaggacatttccatcacctcacgaagaaacccccagacccttcagttatcactctcctattgccccggagcccctccaccaccctaagaaatgactcatctgcctctgtctctagagatttggctgttcttgacatttcgtatgttgtttctctttttttcctttttattcttttgttcttttgacatttcatatgaatggaatcctaatatgtgttcttttctgacggcttctctcactgggcatgttttcagggtcattcatgttttagcctgttagagctccattccttacatggctgagtcatatctactgtgtgggctgtaccacattttgtttatcagttgatcaactttgagttgtttccaccttttggctattgtgaatagtgctgctgtgaacatttgggtacaaatgtttctttaaatgttttcaaatttcttcagtatatatttaggagtggaatttccatttgataatactatgttaactttttttccttataatagattttattttatttatttttgtttttttttttttttttgagacagagtctcgctctgtcgcccaggctggagtgcagtggcgcgatctcggctcactgcaagctctgcctcctgggttcacgccattctcctgcctcagcctcccgagtagctgggactacaggcgcccgacaccacgcccggctaattttttgtatttttagtagagacggggtttcaccatgttagccaggatagtcttgacgtcgtgatccgcacgcctcggcctcccaaagtgctaggattacaggcatgagcctctgtgcctggccggtatcttgttttaatttgcatttccctgatgacatgatgtggagcattttttatatactcatctgccatctatatcttcacagatgagttgtcttaaggtctttagcctccacacctggctaattttttcttaattttagaaatggggtctcactgtgttgcccagggtgatgtgaaactcctgagctcaagcaatcctcccaccttggcctcccaacatgctgggattacaggcatgtgccaccacacctggcctatttgtacatgctttactctacatcgcactctcctgatgactacagctctccagaaagcctggaaaatgcatagtgtcagtcttccaacttgaaccttccccttcaatactgtgttggtattttgagtcttttacctctccatataaactttacaatcagtttgtcaatatccaccaaataacttgctgggattttgattgggattgtgttgaatctatagatcaagttgggaagaaccaatgtcttgacaatattgggtcttctatacgtggacatggaataactattcacttagttctttgatttcttctgtcagagttttacaattttcctaagatcttgtgcacattttgttagatttatacctgtatgttttattttagggcaatgctgatttaattccagtattgtctaagagcatatgatgtacgatattcttttaaacttgttaaggtgttttatgtcccaaaatacagtctaggttgaggagtgttccacgtgagcttgacaagaatgtgttttctgctgttgttgaagttgtctacagacattcatcattgggggtgctgttgaattcaactctgtgcttattgatgttccacgtgcttgatctgtttcttttcttttctttttttttttttttttttttgagacagagtctcactctgtttcccaggctggagtgcagtggcgcgatctctgctcactgcaagcgccgcctcctgggttcacgccattctcctgcctcagcctccccagcagctgggactacaggtactccccgccatgcccagctaattttttgtatttttagtagagacagggtttcaccatgttagccacgatggtctcaatctcctgacatcgtgatctgcccgcctcggcctcccgaagtgttggggttacaggcgtgagccaatgcgcctggcctaatttttatatttttagtagagacggggtttccctgtgttggccaggatggtctccatctcctgacgtcgtgatccgcccgcctcggcctccggaagtgctgggatgacgggcgtgagccaccgggcccggcctggttactgttttctgtttttgttgccctggttcgttgttccttattttgtcttccactctttttctgccttttttggttttgattgcatgttttgtgtgattccat

SEQ ID NO: 2518 - DNA, 1600 bp, Homo sapiens
  misc_feature (1)..(1600): DMR19:3782801
gaggggagaagattcaccaggtcttgggaacctggccaaggagggaatgctggaggatggggtgggtggaggttcggggccaggtttctggctcagatggtggatgatggtgacagatgagtggcgaagctggggacctattgaataaaggactgatctgtgtctgtgggcacccccgaggcagcccaggtcttctatcccatagctgggcatggagacaggcttgggtgatctggcctcagaggtgcggggccccagggcccttcctcccggactgggctaacgtgggtagggaagggggtctgccctcctgggcgtcccctacccctggccagctcctcctcggccgacttggtcccgtgtttccgctttggtctcaccagcttggtgcagatagcgcccttgtccttgctgtaatgctgcaggatggtgggacagccatgagcccagccccagggaggggaaccccagcatcctgttccgttcccgggtggcctctgggtggggtgggtgggaccggggaggaggagaaaggctggtttccataggaacgggaaaggaggcaagccaaaaggagggggagtcctctggattggtatcaacttggggggtcctggggggtccccagaggagtcactctagtccctggaggtagaaccaggctgactcaggccacctgtagattgggcagtccatagggatcagcccccctatttctgcattaaggggaatcctactgtgggggtcctcctgtctgcccatctgagatgggatgggggcctgggggtgcctggggggccctggggaatacccccttcatctccacattggggaagcacagagctcagggggtcccgggtgatcagcacaggaggtagggatggtgtctgcccagctgctggggaagggatggaggtcaggtgacccgcccctctatctctacgtaggggagtctccggagtccctgggctgccccactgcagggacggggtggggcctctgggtggcagcacctccaccatgtccatgaggttgcagaagaacacggcctcatcgattgtgaggtggccgtcgcggtgcagcacgcggtagtggatgacgtcgcggccaaagctcacgcacaggacgtagtcgccggggtggcgcgcggactcccgcaccaggaacagcccatcctcgggaggctgcagctgctggacagcctcctggcccgagatcttcccgtggaaccacctgcggccacggaaggggtgggtcagactgggctgtggagggggggtcacttgctgtcccctaccccaggcccctgtcctgcccactcacggcatgaggctgagcttggggtctgcggagagggcctcccgctcccgcagcgccccagctgccagcagcccctcctgtccactggtgtggtgcttgacgcggtaccagctcttgttctgccagggaggaagcacggggttagtgtggggggtgtgggggtggtcctggtggagcccccagccccaagcacccacacccgccggccacctctcacctcgcaggcctccaggatggtgaccacgtcgcccttgcggaaggccagctcccctggcttggg

SEQ ID NO: 2519 - DNA, 1200 bp, Homo sapiens
  misc_feature (1)..(1200): DMR19:3861901
gggcaacagagtgagaccctgtctcaaaaataataataataaaatacaaagacaatgaacacagggtttacaagtccctttctacgtgttttccttatttttctagggctgcctagttatttatctgatcagggcctttgtcccatgacccccagaaccccaggaaagaacaccaatattcattaccctcaggtgaaaagactgttttccagggccatttgaaaatgcttttaaatctgatgtatttgttctgatcattctaaatacacacgttggtagacccacacaagagacaaatacaaaataaaactattaaaaatccagaaacagagaatatgtttaggagagaaaaaagtctcctaggaatttacttctgccccagtatgtatgaactaacttttggttcttttcttttgagatggagtctcactcggttgcccaggctggagtgcaatggcgcaatctcagctcactgcaacctccacctcccggattcaagcgattctcctgcctcagcctcccgagtagctgggaccacaggcacgtgccaccacacccaggtaatttttggattttcaattgagatggggtttcaccatgttggccaggctggtctggaactcttgacctcaggtgatctgactgcctcagcctccccaaatgctgggattacaagtgtgagccaccgtgcctggcctaacttttggttctaaaacaagtaagatgaaaaatcaaaatccacacttcaaaaacatccaatctacctaattccttgtataggagctcagaccgcaagtcctgtcatttgaaaaggtttcctgaaagtacacttcaacccattttcacgtgcagccggcagctgcctctcggattctcttctaaggagttcagcccctaacacgtatttcagccttgctgagaagggcgtgaaaaagaccgcagcaacatgggaggggcaagttcccccctcgctcctccagggtcgtgctccctggaaagaatgggtgcagcagaggcacagttacttattaggatgtgcaaacagctggaggggcccacggtctcactttcctggggctttttggacctggtggtaggagtccatttacaggtatgcgccctggcccccaaggtggcgacatcggactctccagggcagcctgtgttccttggacctaagctcaaaggacggggttggcc

SEQ ID NO: 2520 - DNA, 700 bp, Homo sapiens
  misc_feature (1)..(700): DMR19:4295501
agtgagccaagatcgagccactgcactccagcctgggcgacagagcgagactgtctcgaaaaaaaaaaagaaaaatgaggctcatcgtccctgtcttgttgggtcattgtggaaaaactgccaactgggatttgtcatcatgagccccgccatctttatcctgggatctatcactctccagatcctgtttggttgtttttgtttttgtttgagcctctactccatgccacgcccattttatagacggggaaaccgaggctcagagagcctaagtcacttgcctagggtcccctacccaggcggcagcaggaaccagctttggacaaagccctgtctcacctcagctcggagatcctaacactgaagttccttgagaacttactatgtctcaggccctgtgctaagcattgttttgttgttgttgtttgtttttctggagacagggtcgctctgtgtcacccaggctggagtgcagtggcgtgatcgtagctcactgcagtctccaactcctgggctcaagtgatcctcccgcctcaacctctcaagtagctgggactatgggtatatgccaccatgcctggctaattttagaatttcttgtagagatgaggtcttgctgtgttggccaagctggtctcgacctcctggcctcaaacaatcctcccaccttggcctcccaaagtgctgggatatcaggcgt

SEQ ID NO: 2521 - DNA, 900 bp, Homo sapiens
  misc_feature (1)..(900): DMR19:4314401
caactaaaacaaaaagtacagtgaggacccatgtagtcagcataaaacccgggaaatggacacgggtgcagtggactcacattctaccttttttttttttttttgagatggagtctcgctttgtcgcccaggctggagtgcagtggcctgatctcggctcaccgcaacctccgcctcctgggttcaagcaattctcctgtctcagcctccctagtaactgggattacaggcgcccaccaccatgcctggctaatttttgtatttttagtagagatggggtttctccatgttgaccaggctggtctctaactcctgacctcaggtgatccgcctgcctcggcctcccagtgctgggatgacaggcgtgagccaccacgccccgccacattttaccagttttacacgcgctcattcgggtgttccacacagttttctcccatgtgtaaattcatgtcaccaccaacaccacggtcaaagtatagatctcttctgtcactacgaggcttccaggtgctacgctttataaccatggcttcctgcctttgacagacttcctagtgagtgaattcctcagggcagaaagttggattcatggaaagctgtgcaggagtaaggataccgatgaaagcagctgcctatgtggtcgtttgcaatccacctactgttttgttgattgcttggaaagatgggagggtttgggttattttcttctttctttcccttttttcttttttcttttttttgagacagaatctcgctctgtcgcccaagctggagtacagtggcttgatctcggctctctgcaacctctgcctcccaggttcaagcgattctcctgcctcaacctcccaagtagcttggactacaggcactataggcatgcgccccaacgcctggtta

SEQ ID NO: 2522 - DNA, 1000 bp, Homo sapiens
  misc_feature (1)..(1000): DMR19:4802201
ataatcccagccacttaggaaggtgagatgagatcatcactgaaggcccagagttcaagactagccaacatagcaagaccccatctcttaaaagaaaaaagaaaagaaaatacattgattttggccaggtgtggtggctcacgcctgtaatcccagcactttgggaggccgaggcgggagaatcacttcaggtcaggagttcaagaccagcctggccaacatgggcgaaaccccgtctctactaaaaatacaaaattagctgggtgtggtggtgcatgcctgtcatcccagctactcgggaggctgaggcacgagaatcgcttgaacccaggaagcagtggttgcagtgagccaagatcgtgccattgcactccagcctgggcgacagagtaacactttgtctcaaaataaataaataaataataaaaaataaaaatagagacaggggtctcactgtgttggccaggctggtcccaaactcctgggcttaagcgatccacctcagcctcccgaaatatggggattacaggaaagagccactgcgcccagacactccttttcctgggaagataaaaagttttgcagcttcccttggaaactggaaaccgtggcagcctcccagggctataataaggccacagccagtgaacaggttaaaaataaaagatccccgcccaggggcacttggggatggcatttgtgagcccaggcaaaccccagggctgcagcgagacactcttgggggaggggactggagaagagcctgctgtgtggcctcaggctggcatctgccccctctgggctccaattgggctggaaacaacattagacagtgatttccaaagatcccacacctgcgcacccctgacgattaactctggctttaatttgtctctgaggggcctttctggctcatcctagtcccggccttgcagtctcattgtgtgactttgcaaagcgacactacctctctgtgcctcagtttctccatctgcacaat

SEQ ID NO: 2523 - DNA, 1100 bp, Homo sapiens
  misc_feature (1)..(1100): DMR19:5233001
agcacctactatatgccaggcaccacgccaagggaagcagcaacaaaagctccaattattgggtacctagtatgtgccaggaaccatgccaaggggaatggcaacagaagctccaattatcaggcacctactacgtgtcaagcattgtgctaaggcttcatagaatggtaacaaaataatctatgtcgaacacctatgtgccaggcaccgtggcaaggggaacagcaacagagctctattagacacctactatgtgccagcgccaagcacttcacgaaataatagtaaaagcatctatttattgaacacctactatgtgccaggtaccatgccaaggggaatggcaatagaagctccattaagcacctactacgtgccaggtaccatgccaaagggaacagcaacagaagctccatttattaactacctactatgtgccaggcactgtgccaaggggaatggcaacagaagctccattaggcacctactatgtgccagcaccaagggcttcacaaaataatagagcatctatttactgaatatctagtatgtgccacgcatcatgctaaggggaacagcaatagaagctccacttatcaggtacctactgtgtgtcaagcattgtgccaagggcttcatagaataatagcataagaatctcggccgggcgcagtggctcactcctgtaatcccagcactttgggaggccgaggtgggtggatcacgaggtcaggagttagagagaccagcctagccaacatggtgaaactccgtctctactacaagatacaaaaaactagccgggcatggtggcgggagcctgtaatcccagctactcgggaggctgaggcaggagaatcacttgaacctgggaggcggaagttgcagtgagccaagatcgtgccactgtactccagcctgggcaacagggcaagactccatctccaaaaaaaaaaaaaaaaaaaaaaaaaaaaaaatctatatgtcacacactatgtgccaggcaacagcaatagaagccccaattattagctacctaccatgtgccaggtgtcatgccaagggcttcatacaataacagcaaatgcacttatttactg

SEQ ID NO: 2524 - DNA, 3500 bp, Homo sapiens
  misc_feature (1)..(3500): DMR19:6090601
gaaaggacaatttggcagttaacttgcagttaccatacgactcagcaactccactcctaggtatattccctgaagaaatgaagctatatgtccaggcaaaagcttgtccacaaatattcatagcagcactattcgtaatagtcaaaaggtagaaacaacccaaatgcccatcaagggatgaatgcataaacagatgtggtccacccatggagtggaatactattcagccataaaaaagaatgaagctctgacacaggctacaatgtggatgaactgcaaaacaatattacccaaccttccagggcttaaatatatatttatatacacacaagtgaaagaagtcagtcacgaaaaaggtcacatattgtatgattctatttacaggaaatattcagaataggaaaacccacatagacaagaagcagacttggtgtttgccaggggctgggagtaggggactgtgatcgacttctaataggtatggagtttcttttcacggtgatggaaatgttctggaattagagagtgatgatggcttcacaacactgtgaaaatcctaaaatccaccaaatgaaaaccattttaaagtggttaaaatggtaaattttgggctgggtgtggtggcgcatgcctgtaaacccagcactttgggaggctgaggctggggattgcttgaatcccggagtttgagaccagcctgggcaacatagtgagaccttgtctctacaaaaaattagccaggcatggtggcgtgcacctatagtcccagcccagaaggtggaggctgcaataagccatgatcgcaccaccccactgcagcctgggcgacagagcaagaccctatcttcaaaaaaaaaaaaaaggtgaattgtatgtgaattttatcacaattgaaaaaagaagatgacgctgagtgctggcaaatgccagccacgaagagaaacaatgatatagagactaaaagcattcctgcattcctcacctcaggagaagtaaaatgcaatattctcataattatgagaaaattaggcacgagaacgtacaaagtacaattcgaacattttcagaaataaacttcagtaacaaacaacaatatctgttggacacgatccctaacagactgtttgtgaaaatctcgagtgatgggagagaagtaggtgtggggaaatctgtttcaggaactctgagtctaagccgcaaaacgtgtttacatgagacccatcaacagaataagccgagggactgaatgaggaatgaactgcgggaggtaggcattttacaatcaggaatctgaaatgagactatgtcccagtttgggagtcagagaattgtagactttctgggccaagccctcagtgaacattaaccctggagaataaaggagcagggagtttctagaagattctacatccgggagtggggggaggaaaactgtggaggttggtgtctcagaaatcttaaaggatgttaaaaaagaaaaccatgattcactgaatttaaaataggagaaaagctcagattaagaatgaataactttatcgaggattaggtcacaggaattctggttttaaattgtttacgtagagttaaagagaaagaatttgtaccataagaagaagccaactataacagcaaggaagacattcaagaacaggatctagtggctgcacaactgagctccctcctcgggctggagagagcaggggctcaagtccctaaacccgggccatggcagcagggggtcaatgacccaagaaagcagcttgggacggagggtggccccgcaggctgcatgctgggctgctggaaggaaggtcttccgctgagaaggcagaagaacgagtgctctgctggagaataaaggtagcagagtttacagccacgcgtccagagggaattcagaggggcggggcaggccgttgctaggctcgagtccgcgcaggagtcaagggcgacaagcatgagcttgtggctgcgcaaaccagcccagcagccaggcctccccaagaggcacacgcgagcatgggcgcagctcacggtgacagaatgaggctgagtcagtcacacgtggactgtaggataggcagagctaagctgacagggaacacgttccagaggaggggccgggggagggagaggctgccagggggtttgagcacctcctaagtggcccacagaacactgtgggtgagttcagtgtgcattctcctggagggtggggacacaagttttcacgaggctgtcaaagggtccgggacctgctactctgaaatgttaagaagctaaagagtttgtgttggcctgagaggcaaggagtgggacggggacttagggcaacggacacgcatgtggtaaaaaaaaggccctgtggtgtcggggaggcgaggaggtggccccggtcctgctggaggcggcgtagtttcaggagaggacaaaagtggaaagtcacctttatagtaggaatggagcgcagatgtaagtggcggcaagctaacgccaaggggaggaagtccatcaggctcagcaatttccctgccgcgagtgggcaaacatctcacacgtgtacacaaatatatttggacacgggtgcttactgcagcattggcggtaaagtggaaggtataaccaaaatgcctataaataaataactaaggccgggtgcggtggttcatgcctgcagtcctagcactttgagaggttgagtggggcagattgcctgagctcaggagttcgaggccagcctggccaacatggtgaaaccccgtctctactaaaatacaaaaaatttgccgggcgtggtggcacatgcctgtaatcccagctactctggaggctgaggcacgagaattgcttgaacccgggaggcagaggttgcagtgagccgggattgtgccactgcactccagcctgggcgacagagcaagactctgtctcaaaaaaataaaataaaatagaataaaaggctaagtaagtacttaggacaggagtggaatatcagaccattagtagaaagaatgaagcacaaacacagtagaaagtgataaggaaagatacaggctaaatattaggtaaaagagcaggtggcagaaaagtgagaaaaataagatctcttttttgaagaagaaaaaaaaaacacacaaaaaaaccctattagtccagccatgaaaaggaatgaagcaccaacacgtggtacaaggtggatgaaccttgagaacatcatgctaaaaacagccagtcacaaaaggctacttactatatgattccattttcatgaagtttccagaacaggcaaatccacaaagacagaaagtggcttagtggctgccaggggctggggaagggaggtggggagtgactgcttaatggggacagggtgtctttttggggtgatgactctggaattagatggtggtgatggttgcataaccttgtgaatatactgaaagccactaaattgtacacattaagagcctgaattctgcggcatgtgaattacatcc

SEQ ID NO: 2525 - DNA, 2300 bp, Homo sapiens
  misc_feature (1)..(2300): DMR19:6340701
cgcccagcccagaccggagaacttgagtgatcatggtgctgactagggaggacagagcagccaggaaggtgggtgggagccgggggagagctcttcccccgctagggggagagaaggggctagagagagggtgacaaacagaggcgtgtgagctctcagcggttattgtaacaaatgccaccaatgtaatggcttagaacagcacacacttatcatcttacctttctacaggtcaggactctgaaatgagtcttataggctaaaggtgtcatcacagctgtgttcctggtggaggctccaggagagacctcgtttcctgccccgtccagtgtctagaggcaacccatgtcctgttctccaccttcacagccacagtgcagcctcttccagtctctctctgactttgttcttttcttttgagacggagtcttgctctgttgcccaggctggagtgcactggcgcgatctcggctcactgtaacctccacctccagggttcaagcaattcttgtggcaggagaatcgcttgaacccaggaggtggaggttgcagtgagccaagatttcgccactgcaaaccagcctgggcaacagagcgagactccatctcaaaaaaaacaacaacaaaaaaccagtctaggcaacataggggaccctgtttctacaaaacattaaaaagttagccagtgggggtacacacgtgtggtcttaacttctcaggaagctgagatgggaagattgcttgagcctaaaggtcgaagttgcagtgagctatgtgtgcaccactgcactccaacctgggccacagagcaagaccttgtctcaaaaaaaaaaaaaagaaaaaaaaagaaaaagaaaaagaaaaaaggaactatacccatcttagcattgggcttttttttgttttcttttgttttgttttgttttgtttttctttttgttttgagatggagtcttgctctgtcacctaggctggagtacaatggtgcagcagcctccactcaccacaacctctgactactgggttcaagcgattctcctaccccagcctcccaaatagctgggattacaggcacccgccaccatgcccggctaattttttttatttttagtagagacgcgggtttcaccaggttggccaggctggtcttgaactcctgacctcataatctgcctgccttggcctcccaaagtgctaggattacaggcgtgagccactgcacccagcagtgttggttttaatacttgctttctatttatttagtagctttccatgtagtggagcaatataaaatttccttttgaagtaaagatatgcattaatatttggaaagtgtttttggaaaatgaacttgtttaaagacagtgtttaagtcaataatggttaccgtacagatggggaaaattttagtctaacaatgcccaaagtcacaaaggacattattgggtaattggtgaaatttgcacatggaatataaagtagataatagtattgtgtccatatttattttctgaagtagataaatgaattctggttgtgtaagagagtatcctagttctttttttttttttttttttttaagatggagtttcactctgttgcccaggctggagtgcagtggcttgatcttggctcactgcaatttctgtttgagttcgagaccagcctgggcaacataggcagactgtgtctctaaaaaaaaataataataatccattttaaaaacaaactatttcagaccgggagtggtggctcacacctgtaatcccagcactttgggaggctgaggcgggcggatcacgaggtcaggagattgagaccatcctggctaacatggtgaaaccccgtctctactaaaaatacaaaaaattagccaggcgtggtggcgggcgcctgtagtcccagttactcaggaggctgaggcaggagaatggcgtgaacccaggaggtggagcttgcagtgagccaagatcgtgccactgcactccagtctgagcaacagagcaagactcaatctcaaaaaaataaataaataaatacaataaaataaaaacaaactatttcaagataaaaagttgtgggtttgtttgttttgagacggagttttgctcttgttgcccaggctggagtccaatggcatgatctcggctcactgcaacctccacctcccgagatcaagtgattctcctgcctcatcctcccgaatagctgggattacaggcacccgccactgtgcccggctaattttgtatctttagtagagacagggtttctccatgttggtcaggctggtctcgaac

SEQ ID NO: 2526 - DNA, 2100 bp, Homo sapiens
  misc_feature (1)..(2100): DMR19:8054101
cgggagccctgacactgggtcctacatcctctgagtttcagcagctggccaaagcagggtccctggctgggcggcagacccagggtcccaccctccttccctgtctgcccccacctgacccacctgcccctcggctgggtctgatgggtccaagtccttggcctttgcctgggaagggggttgggctgtggtctgattgttttgctatcagagccaggcccagcccagcccttcgatcctggcctccagccttgggaactacctgcctggcactgcagtccgaggttccaacagaatgcgctgccccttgccctcagaggccgcggttgggagacacctggagggctcgagtcctccctttccctgctcctgctgggctgggctctgcagggactcagactcggcctctggaggttagttctggcagaggtgagattgcagagaactccaaaggccatttaggcagagaattgcaccccagcttcctccactatctcatcagctcatcctcggctcattcattccacctgctcatccccccagaactttctggcatcacctcctcctcctctgggcaccccccacagtgcctgtgcttccccctttctgcagagatcagtttcccgggagctccctgaagacaacactaggtctaattcatctgtgtgtttcatctctgcttgtctagacattgacatttactgagagctctttactttgtattaaaacaattttttgtttgtttggttggtgttttgttttgtttcattgagacagagttttgctattgtcgcccaggctggagtgcaatggcgtgatctcggctcactgcaacctccacctcctgggttcaagtgattctcctgcctcagcctccagagtagctgggattaaaagcgcccactatcagccaggcacagtggctcacgcctgtaatcccagcactttgagaggccaaggcgggtggatcacaaggtcaagagatcaagaccatcctggccaacatggtgaaaccccgtctctactaaaaatacaaaaattagctggtcgtggtggcgggcgcctgtaatcccagctactcgggaggctgaggcaggagaatcgcttgaacccgggaggcagaggttgcagtgagctgaaattgagccactgcactccagcctgggtgacagagtgagactctggaaaaaaaaaaaaaaaaggcgcccaccaccatgcctggctaatttttgttttttgttttgttttgttttgagacggtgtctcactctgtcgcccaggctggagtgcagtggcgcgatctcggctcactgcaagctctgcctcccgggttcacgccattctcctgcctcagcctcccgagtagctgggactccaggcgcccaccaccacacccggctaatttttatatttttagtagagacggggtttcaccgtgttagccaggatggtctcaatctcctgacctcgtgatccgcccaccttggcctcccaaagtgctgggattaaaggcatgagccaccgcgcccggcctaatttttatattttttagtagagacggggtttcaccatattggccaggctagtctcaaactcctgacctcaggtgatccacccacctcagcctcccaaagtgctgggtttacaggcatgagccactgtgctgagctgccaatcagctcatttttaggagggaagaacttggctggggaggggtggtgttggcccctcctcacagtgcacctgcactccgagtcacccttttccccagagcaggagtagaggtggccttggtccgttcatttgctggttccacacccttcccagccgggacccaagggtcctctccaacctctggctgtcccaatatccagggataaggggtgagccaggaggctttttctttcctaaggctgttcctcagcctctgccgggcctggaagggttgtggtatgagcagacaggtatgcagacaggtgcccttgcctgtggctggccctgccaagttaacatgcaagggtgcgagtatctgggcggctgtgtggttgcaggtgtctttgaggactgctgcctggcctaccactaccccattgggtgggc

SEQ ID NO: 2527 - DNA, 1200 bp, Homo sapiens
  misc_feature (1)..(1200): DMR19:8300401
tttcttttttttgagatggagtcttgctcttgtcacccaggctggagtgcaatggcaggatcttggctctctgcaacctctgcctcccaggttcaagcaattctcttgcctcagcctcccaagtagctgggattacaggcgcctgccaccacacccggctaatatttctatttttagtagagatgtggtttcaccatgttggccaggctggtctcgaactcctcacctcaggtgatccgcccaccttggcctcccaaagtgctgggattacaggcatgagccaccgtgcccagcccaggcagatctcttgatcccagttcaaggctgcagtgagctgtgatcacactactgcactccaacctgggcaacaggtccatctgagtccatctctaacggtcccagggaggtcactcccctgcaaggaggctactgtggcccccaacatcccattcagagattcagaagctgaggataagggaggaactttgccctgtcacccagaagtcagggtgtgaattaactttaccggtcaccaacctttttggcagcagggactggtttcatggaagacaatttttccacggaccaggggtggggatggtttcaggatgattcaagtacattacttgtttttgtttgttttttgagacagtcttgctgtgacacgcaggctggaatgcagtggcctgatcacggctcactgcagcctggacctcccaggctcaagcaatcctcctacttcagcctcccaagtagctgagactacaagtgcacaccaccacccacagctagttaaaaaaaaatgtataggccaggcacagtggttcacgcctgtaatcccagcactttaggaggccgaggcgggcggatcacctgaggtcgggagttcaagaccagcctgaccaacatggagaaaccccttatctactaaaaatacaaaattagccaggtggggtggcacatgcctgtaatcccagcaacaagaacgaaactctgtctcaaaaaaaaaaaaaaaaaaaaaaatttgcagagatccctatgatgcccaggataaataataaaaccttttttttcttttttgagacagagtctcactctgtcacccaggctgcagtacaatggcgtgatctcagctcactgcaatttccacctcccaggttcaagggattctcctgtctcagcctcccgagtagctgggat

SEQ ID NO: 2528 - DNA, 3200 bp, Homo sapiens
  misc_feature (1)..(3200): DMR19:8765201
tcaggggcaggaagccttggggagcctcaccctcttctactgaaggcgccacacacacattctctgctctctgggctctcacagatccattttcaatgtcaatctcccagacagtctctgtactagtgagcaggagccagcgggcatgggcagggtacaagagatccttcagggacatcaagagttgctcagggaccaccaggagctgcacattgaggaggctgagtcgcagggctccctgtgggtccagccccaggaactcctgccccaggcgcaggtgcaggaccattcctggttccaagaccgcgatgatcatcttcctctggggaagctgtgggccctgggggagaaaagccgtgggtcagtcattgtcctctgagggtggctcaaacagggagagagcaaggcggggagctgccagtaacttccccaggcataaatgaaaccccgcagggacacccagaattggcacctgtattgacgccccttgggacggtgatttcctgcaagtcccctagggcctggagctcaggcagacctgtctcacccacgcccacctaggtggtgtgaccttacctggggcagctccaggggcagctgtgcagggtggtggggagctggctgtaccggagctggttctgcacctgtggagagagcagagtgtgcaggtgaaagcccttgtcatgcaggatgcccttgagggttcaaggtgccaccgtgagaaagaccaaatacagaagaagccaggtacaggacacccagccacggagctgcaggaggaagctcccgacactctggacagcacagctgctcgcctcatgacgtgacgggacactggcttggtagcaggggactcaggatgaaaaagagaagatgcctcacctggatgaggacccagctcctccactttctggcgttttggggcatttgatggcgtgccgctggagctgtaggacagagagagagacacagtcagatttcgggcagttccctaacgtccaattccctgaatccccacaaattcactccacttccctgcctttcattcaaggccacagactcgtcatccacttcctgtgagacctgctcccaatctgtcctaactcccagctgttcttgttctcaccccatctacctgagcttccctgggtgaagaaaaggcagggaaggagggtcggtgcccacagggagcagtttaccctttcaggagctcatgcagatgagagttggaaaactctccttgggtgtgaggagctggagaaagatgttgagatcccggagaggtggcacctctgtctacacaggtaacaaaggaatggggtcttaggattcgaatcacagcaggagaagaggaaggaatttgtcgggcatgacggcatgcgcctgtaatcccagcactttgggaggccaaggtcggaggattgcttgagtccaggagtttgagagcagcctgggcaacatggtgaaagctagtctccactaaaaatactaaacattagtgggtcatggtggtgcatgcctgtggtctcacctactcaggaggctcaggtgggaggatcacctgcgactcagaggtggagcccgcagtcagctaaaatcacgccactgcactccagtgtggaccatcggagtgagacgctgtctcaataaaataaatcagtaaataagacaaatagaaaaattaaaaatgaaaaaaggaggaaactgttttatttttcctagtagatcttgaaactctcacatcatgtcctacaatctcccttcttgcagaacacagaacccattccctgtggagctggttgggtggattgaaagtggggctgccctgagatatgtgtgtggttgcgatgtagaagccttcccagcaccctgtgatgacttacgggcacctcacttccctctggccccaaattcaaaacatccaatctcatggcaggttcatgcacccttttcccttcccctctctccaacacacacccacacatcccacaggcaggtcaccccgcaggcgtccccagcacatagcaaagctcacccgctctctcctgcgtggtcgctcttggattcggtgcaggaatcactggggcttcttgggcgccgggaacctttcatggtgaaaatttccagggttctccaagtcagccactgccagtgtttgtctgtctcctgcaaagatttcttcttggctcccgaatcctttagttcctttgagagagtggtgtcagccccaaagctgctcccgaaggcttgggatgtgtagcgacggggctgtggccagcggcaggtggatgaggctctgacaactgagctcttgggggaatcttgtacactgtcagcagggggtggagccaggggatttgtcagcaggaactgatgtgattggctgttcctggtatgacaacgggaggggccctcatggaggattggggcgtaactcaatccatagatgaccgatcaacagaacctgcctaatcccatcaagagccaacctgtttcctgtcccctcccatcctctaggtcttgcctaataatgatagacactttctgtcatacccaattcatccatcgctgaaatagtttttcatgtgtgccttttatattttcatgcaataaaaatatgttaattttcacggtggctatcctggggaatgctatgtacatgaaatgaagtgtcaaaggagcagaagcagaaggaaattcacaagcttctctgagcgtctctgcttcaattcctgccatgtttcctaaacatgttggcttctttcttcctacccaagtaagaaggtgcttcagaagttcaatcttagggcatttgacaaacgccgctgagaatttcaggatgacacgaaggaacctttgattggatttgtggatgtgcctgtgaaagcgtgtgtgtgtgtgtgtgtgtgtgtgtgtgtgtgtgtgtgtgtgtgaagccaggatgaagtggctgttcctggggtggagacccttctttctcttgagaatgttcattgctgttgactcattgtgggttttggagatattttctctctttctttcgttctttcagacattttttgctttctccctccctcgatcctaacccccctccatccccccctcactccctccctccctctttccatccttcctccctcccttccctctttccttccttcctgccttcttcccttccccttcccctcttccacgcctgt

SEQ ID NO: 2529 - DNA, 400 bp, Homo sapiens
  misc_feature (1)..(400): DMR19:9416001
tttagtagagacgagatttcaccatgttggccaagctagtctcaaactcctgacctcgtgatccacacgcctcagcccctcaaagtgctgggattacaggcattagccaccacacccggcccctgtatttgttttcaaattaaacacggtaacaaaaaacaaacacaaagacagatttgaagattgtatatcaaaaatttggcaataataaggatatagcgtcaaaattttacatagtttactacaaactgattctatgaaaattataaactgatggtgaacacaaagaatattaccatggaaggaaagttgaggaatagaacaaaaagcacacatcaaaacaaggagcttgtttttgttttttgtttttttttttttttgagaaagactttcactcttg

SEQ ID NO: 2530 - DNA, 200 bp, Homo sapiens
  misc_feature (1)..(200): DMR19:10199101
tgcacaacaatgtgtatatactgaactgtacactgaaaaattgataagatggtaaataaaatactattagtaaatggggctaagtttttttctttttttttttcttttttttttttttttgacagagtctcactctgttgcccaagctggagtgcagtggcacgatctcggttcactgtaacctctgcctcctgggttcc

SEQ ID NO: 2531 - DNA, 500 bp, Homo sapiens
  misc_feature (1)..(500): DMR19:11312101
taaccacctcctgcttgttttggtgtttgtttcctcagggctgtttccataaactcctaaaaatcaccaagactcagagcttcaccctgagtgggagctctctgggagctgcagtgatacaggtaagacccagcctctctagggtctttgagctgttttattaagcacctactgtatgccaaacactgttctggtcactgggacacaggagtgaacaaaactaaaaaaaaaaaaaaaaagaaactcaacaaagaagaacaaactaaacccaaatcaagcagaaggaagatgctaaagattagagtgaaaatatgaaaataaatgaaatggagaacatcaataaaaccaaaatttgattctttgaaaagataaaacaggtcgggtataatggctcagcctgtaattctagcactttgggaggctgaggcaggaggactgcttgagcccaggagttcaaaatcagcctgggcaacatagtgagactccccatctctacaaaa

SEQ ID NO: 2532 - DNA, 100 bp, Homo sapiens
  misc_feature (1)..(100): DMR19:12252801
acactgaagtcacaaagaaaattaaaaagtatgtaatctacaagtaaactacctaattatatgttgcctacaagaaactttttttttttttttttttttt

SEQ ID NO: 2533 - DNA, 1000 bp, Homo sapiens
  misc_feature (1)..(1000): DMR19:15087001
catctctgacacctggctctgtgtggtttttctccctttttgttcccactagtcacagaccatacatggaaccagaaaagcaaaccgaaatctcagaattcttcctccagggactctcagaaaagccagagcatcagaccctcctcttcacaatgttcctctccacatacctggtcaccatcattggaaatgccctcattatcctggccatcatcacggactctcacctccacacacccatgtacttctttctcttcaacctctcactcgttgacaccctattatcctccaccaccgtccccaagatgctagcgaacatccaggctcagagcagagccatcccctttgtgggctgcctcacccagatgtatgccttccacctgttcgggaccatggacagctttctcctggcagtaatggccatcgaccgcttcgtggccattgtccacccacagcgttacttggttctcatgtgctcccctgtctgtgggctgctgctgggagcatcatggatgatcaccaacctccagtctctcatacacacctgcctcatggctcaactgaccttctgcgccggctctgaaatctcccacttcttctgtgacctcatgcccctgctgaagctctccggctcagacacgcacaccaacgagctggtgatctttgcttttggcattgtcgtgggcaccagcccattctcctgcatccttctctcgtacatccgcattttctggacagtctttaagatcccttctactcggggcaagtggaaagccttctccacctgtggcttacacctcactgtggtgtcactgtcctatgggaccatctttgctgtgtacttacagcccacatcccccagctcctcccagaaggacaaggcagccgccctaatgtgtggggtgttcatccccatgctcaacccctttatctacagcatacggaacaaggatatgaaggcagccctggggaagctcatcggcaaagtggccgtcccctg

SEQ ID NO: 2534 - DNA, 1400 bp, Homo sapiens
  misc_feature (1)..(1400): DMR19:17063701
ccttgagggcctgaatacaacaaaacagtggaaggaggagaaattcataccttttgcttcctgcttgcctggttgagctgagacatcttaccccatctcctgacctgtcctcaaactgggacttacacctttggctcccctggtctcagcccttcagactcacactgaactaaaccaccaaccttcctggctctccagtttgcagacagcagatcctgggatttctcagcctccataatcacatgagccaatcccgtgtaaataaatctccttttatatattcatatccttttataagcctctcttattggttctgtttctctggagaactctaatacagcaggggtgcaggacacacgatcaatatgtaaaaattcatatttctagcaatgaagtagcaatgaacaagtttggagattgaaattaaaatagagtaccatatacaatggcactaaacaccaaatgcttagttataaaccaaataaaatatgtgtaagatctataatctggaagctacaaaacaatgttggaggaaatccaggaagatctaaataaatggagaagcataccatgttcatggattgaaagactcgcttttattaagaaggcatttgccctgatttatggattcaatataatcaaaatccagcagatattttgctagaaaatgacaattctaaaatctctatggaaagccaaaggaacgagaagagactaaacagtctcggaaaagcacagtgagaggtctcacattacctgttctcaggacttagtgcaaagctacagtaacctcagcagtgtggaactagcataaggatgcatacatagaacaatggaaaagaacagagcccagacatgatgtgcacatacatggtcaactggtatttgacagagatgatgagagaatacaacgggaaaaaggaaaatcatttcaataaatgggattacaacaactgaacacccatacatgaaaaaacgaactttgatttaaacatcacaccatacacaaaaactaactcacagacttaaaagtaaaacctaaactacaaaactcgtacaagaaaacaggagaaaaatctgtgatcttggattaggtggagatatcctggataagactccaaaagcacaatccacaaatggggaaagtgatcaaatgggcttcatcgaaatcgtcaactactgcctcttaaattaaagcacttaacagcatgaaaagacaagccagactagaagaaaatatttgcaaagcaccacaaagagctggtatccagaatatagaaagcaccctcaaaactcagtaacaagaaaacaactcaatttaaaactggacaaaagatctcaacagacacatccgcaaagatacaggaatggcaaataagcacatgaaaagatgctcaata

SEQ ID NO: 2535 - DNA, 800 bp, Homo sapiens
  misc_feature (1)..(800): DMR19:17159801
cacatggccatacccattcatttacataccacttaagactgctttggagccatagcagctaagcagagcagttgcaacagagaacatcaggccccaaagccaaaaataatgactccttcatcccttccagaaaagaatttgcccatccctagactctggaacatgacactgactacccttatgtaactcccagcctgtgagtctcaagcctgtgactctaaaccttgatcaggtgcctccctctggtctttgccccagcctggatgttttctctgtgctgtatttctcttgcatttttacatctcaagagcaggatcacttgcagcttgtttaacaataggaaagtacctaatcacggcagggatttttagcccctcacccgatgggaagctgctgtggcatttcaaacaggcaccggggacattctgagcccacatgggtccagggcaccacgtgatattgctgcatatcacccaagacccgagcagcactggtgtccccagaggctccatgcagagccaaaggcaccaggcaggggctgcattctgtgtggctccatttccttgacacccaagaaatgcaaaacgagggggacacattctagatcttgtctgtagctgaatacatctgtcagagctgagacctgaatatgtggggaaaaaagccaatttattccatatagattagaccttaagagcttcttttttttctttttttttttttttttgagatagcgtctcactgttgcgcaggctggagtgtagtggcacaatctcagctcactgcaacctctgcctcct

SEQ ID NO: 2536 - DNA, 200 bp, Homo sapiens
  misc_feature (1)..(200): DMR19:17420901
tgtgtctttttacaccatagccaagcaaaaccactgcgcagttttctttttcatttccaggctttgcacacgccgcttcctctgcctggggcactttttctctcctttttgtagctcattctccgtcctccgtcagatgtcaccttcacccttccctacccctcctcttctgggcccacaaccctagtgcagccctccca

SEQ ID NO: 2537 - DNA, 100 bp, Homo sapiens
  misc_feature (1)..(100): DMR19:17546601
cccagggctagggcagaagcctgtgttgtaggcctctagaggggccctcctctccatccgagcccctaacccgccatggttccaggagctgcctgagttc

SEQ ID NO: 2538 - DNA, 1300 bp, Homo sapiens
  misc_feature (1)..(1300): DMR19:17670901
ctcacagtaaaataaaataaaataaaataaaataaaataaaataaaataaaataaaataaaatgacaaaaacgaacaaacaaaaaacagtccccagtccctcctctatgcctggttcatattgggtgatgccagggtccccaagaggcccagccatcatcaccctggctcctgagagcccatagcccttggaaacagggctggacacaggcacccccagccccatgaggtcatagcccagagggaggaaggagggctaaaggatctagagagaagtcagagagggcttcctggaggtgggcacatgggaatttagaaggtgatggaaaggaggacacttgaagctcagggaacacactatgcaaaggttcagagggtggaatctgggaggggtagaggttagagtgtggggggagatgaggctagtgggcaggtgccatctgaagggcctcccaaggcagatggacaggggaggacagatcagagctccagctaataaggccttcctggggtcagcatggagaggttgagacttgaggttaggaggccagggattgggctgtggggacagatgaatagacatgaccacggcctggcatggtggctcgcacctgtaataccagcactttgggaggctgaggtgggtggattgcttgagcccaggagttcgaaaccagcctgggcaacatggcaaaaccctgtctctattaaaaatacaaaaaaaataaggggggcctggtggcatgcacctgcagtcccagctactcaggaggctgaggtgggaggatcacttgagcctgggaagtcgaggctgcagtgggccatgatcatgccaatgcactccagcctgggcaacagagtgagaccctgtctcaaaaataaataattaaataaaaaatagacatcactactacctgctgacaatgatgcacaggctgaggggccagggttgttacctagcaccttcttatgagttggtgtaagcttcctgctgctgcccatctgggacacaaaatgctaattgcctatattatcccttttctccttccaaggtaatacatttttagctgtgcctagggaagcacagcccaggactacattttccagcctaggactacatttcccagaatcccttgcagcaaggtgttggccacatgtctaagttctggccaatgagatgtgcatgaaccacccccctcccccaccaccagcacctttcggtggttggaatgaagatgcaatggtgagcctaaagcagccatttggggccacaaggtggaagccacatggagagagaggca

SEQ ID NO: 2539 - DNA, 2400 bp, Homo sapiens
  misc_feature (1)..(2400): DMR19:18505501
tcacctcatccagagtttcctaggttttggtgcttcaacagccctcagtaacgcaggctccttactatgagatagcctgggagagagctggggtttctgtgatgggaaagggctaagccgggaaaggaaacagtgtgtgactggcgccttgcaagccacctaaggcaccaggcacacacaggggaggggagaagaggacgggagaggagtgggggccacgggatgcggcttgtgttcccctgatgtcctgggacacagctccctgaaccccaaaacaccccacggacaggaaagcaaagtaaggagaggtgaatgtgagttgcaggaggggctgcaggcactgacctgacctcccacccacaggatgaccccacacagcagagggagaaactgaggcccagagggtggcaccactgtacagtcaggtacccccaccctgtgtcctgctctgtactacacagaccacccagcacacatgtggccaataccagtgaggcaaaggtggcagcctgggccccccatgctggccctcagccatccctgggacaacagtctagacacccagaagctctgcacctaggcccactgacccagcctccctccaagccctgggtgcccatgtgtgcccaggctgctgcccctggcactcaggccatgccacacgcagcagctgggtctgaagcctggcttggaaccagccccccacagtcaacatggagacagccctgctggcaccgccccaggcctgggccctgtctcccgcaccctccagcgacctgcctgggccaccctcaaggtgcgcctgctcctaagccgcctcccacagtggagggacacccgggctgcttcagagcagactgtggcaagttaccctctcccccagggggaaagggatccaaagctcctgtgcctctggggtgcagcatcagcccagacttctgctcggctgggtgccatggctcacgcctgtaagcccagcacattgggaggccaaggcaggaagttcgtttgaggtcaggggtttgagaccaggctgagcaacacagggagactctgtctccatataaataaaaaattagccaggtgtggtgccacgcacttgtagtcccagctatttgggaggctgaggtaggaggatcacttgagcccgggagccaaggctgcagtgagctatgatcacaccactgcaccccagcctggatgacagagcaagacctcgtctgaaaaaacaaaagcagacttccgttcaacagcatgtgaacctcaccttgcacacctaggagttcgttaccctcctcagctcagagattagagggaactctccccacagagatgctatgatcagagggccagggaccctgtctcattgatcctacgctctacgccagacatcgcctcagaatccttctcaacacggctccacttcctatctacaaggagctggcctacaagatggaagcgattcctacattatggggtcatgtggctccaggcacatggccctcgaccagtgggagcctgtgcacaggtaagagagccagggcagcctggagatgagctggacacaggctgccagcactggctgtcccctcccacttgccaaatccagtgtgagctgagcacatttcactggaacaagcaggcgtctgagagcatccaactccaaaaatagtgccaccaggagaggaaggaacacgctcttctagctgcacccgctccctgccctcagatacctccctgcacagtctgtgcctggcctgtggcagttcaagggtcacacccaactctgaaaagggagagataacatccccagataagaagagtgaaaacaggccaagtctgctgccagagcctggccacagacccacagccccttggcagagaactgctcaggaagtcctcctctgagtctttcaagccactggtatctaacaaagaatctaatctgcacacggcacttgccccgagctaagaaagttctggaagggtctcctaggtctccccagcccaaggtgagcttgcttctgtggagggagatgcctgcctgcccatgtccaccaccactgcacaccaagccagtctgaagccaccatgatctggctgttgctggtttatggtgcacctccccgctgcgaagaagtgggccatgtgagcgcaggggcttcatccctcctgcttcttactggagaaacactcctggaggcagccgaaccctcactgggtgcaatccctctgtgtaggagattgcactgtgtaggttgtgccccgccgaacaaccacgcagctgaggctcagctcagagactgcattcagagcccaactagaatcagacacaggttctgcgggccccactacccatctggaggcagacgcctgacccccagctccatccccagagat

SEQ ID NO: 2540 - DNA, 2600 bp, Homo sapiens
  misc_feature (1)..(2600): DMR19:18796201
ctcccaaagtgctgggatcacagatgtgcaccactgcacccagccccattctccttttactcagtccctacccccattgcatcccaggctctactggatggcgataaaggaagaagacaacaataaatacagtggctacagttttcttgagcaagtgccaaatgcttgaaaccttaccactcagcctttgtgggttttctctttctgtcatcccttaagtcccagaaggcaggaatttgtcatcatgggagacagtggggcacagtgatgaaggtctcagtctctggcatcagagcctgagtttcatatcccagctctgctgtggtacatgaggcaagttgcttaacctctctgtgcctcagtttcttcttttttcctttatttcttcttcttttttttgccaccttcgaaagtttcttataatgtaaaattttacttctcaggttactatactgaagagttgcttcaggagagaaagaatttcaccagaggccgggcgtggtggctcacgtctgtaatcccagcactttgggaggccaaggagggcggatgacctgaggtcaggagttcaagaccagcctggccaacatggtgaaaccctgtctgtacaaaagtacaaaaattagccgggcatgatggcaggtgtctgtaatcccagctacttacttaggaggctgaggcgggagaattgcttgaactcaggaggcggaggttgcagtgacccgagactgcaccattgcactccagcctgggcgacagagtaagactctgtgtcaaaaaaaaaaaaaaaaaaaaaaaaaaaaaaaaaattcactaggaacagataggaatttcacaatattcaattgatactggtttctttcttttttctcttttccttccttccttccttcccttcctccttcctccctccccctctcccttccttcttccctcctccctgtctctctctcttcctctctgtctccatttctttcttgtttttgaggtaggttcccgctctgtcaccccagctggaccgcagtggtacaaacacagctcactgtagctcaaactcttgggctcaagccgtcctcacacctcagcctcctgattagctggggccaaaggcatgtgccaccacacctggctaattttttttattttgtagagacagggtcttgctctgttgcccaggctgctctctaactcctgggctccagtgtcccttccatcttagcctccagggtagctggaattacaggcataacacctatatttaatgaaggtttcatgcagtcaaataaactagtgtctgtgttctgaggggaggagagtgccttcagggctaactgtagaagctttgttctctccttcagtctctctgtctaatgaagtgaaaatggaaatgtgtaaagttttacgcaaggtaacggtagcaggaaaaaccaaggtgaatataagtatgagaagaatcctgacctcttagcgtcagtgtaagaattgaatgaattagcgcccagaaagttcacagcccttgcttgggaggcggaagtgggaggatcgcttgaacctaggagttcaaaaccagcctgggcaatatagcaagaccctgtctctaaaacaaaacaaacaaacaaaaaaaaaatttaaaattagccaggcatggtggtatgtgcctgtagtcccagctactcaggaggctaaggtgggaggatggcttgagcccagaagtttgaagctgtaatgagctatgattgtaccactgtaccccagcctgggtaacagagtaagacctcgtctcaagaaaaagaaaggcccaggcgtggtggctcacgcctgtcatcccaccccagcctgggtaacagagtaagaccctgtctcaagaaaaggaaaggcccaggcgtggtggctcaagcctgtcatcccagcactttgggaggctgaggcaggtggatcacttgaggtcaggagttagagaccagcctaagcaacatggtgaaaccccatctctactgaaaatacaaaaattagccaggcatggtggtgcatgcctataatcccagctactcaggaggctgaggcacgagcgttgcctgagcccaggaggcagaggctgcactgagctgagatcatgccactctcactccagcctggggtgacagagtaagacagagtaagactctgtctcaaaaaaaaaagaaaaaaaaaaaaggaaaagaaagagctgagccctcaatcaatgtcagctattaacatccccattttacaggttggcaaactgaggctcagcaagtctgtcctgtctcctcaatttggtcactggatgctcagagtgggaagtcacctcctaccgctgcctaaggctccaggagagagtctcccaaccaggcttctgcagttcccgctggagaaggtagggtgggctgtcagcagagaaagtggagagtgcagggaccagagcactactgcagttcctcagtacccctcgtgcccctcccagcccctacctgggctcattaacaggaggcccttgttcaggggagtgatggatggcgtgggaggccgagggcggggtgtgtttacccaccggcggctgcagacaggagcccaggccaggg

SEQ ID NO: 2541 - DNA, 1600 bp, Homo sapiens
  misc_feature (1)..(1600): DMR19:19056901
agttccccactctgcatgcgcttcccacctgctgtcctgctggtggtgggagccaccctgggaagcttccaggcagtgccccgcgcccacccacagcaggtgcacagggcacaaatgtccactgaatgggtagggatgtaattgacaggtgcctgtgcacaaccactgtcttcccgtggcctcactgcccccttgccctagggccccttccttggctctgtgccagcctcgggggacctcaggctcaccaactctgaggctgagagttccaaagccataggatagatcctggagcttccctgagcctgtttccttgcctgggagttagccatgccttgtggggctgccaagagggtaaagtagagagatgggtctagcttgatacagtataggcagctgctggatgtcagctgtggttatgatcacctccatcttgttatgatgaagaccctgaggtcagagtggaccccaccccaaagccccatctggcagctcacagctgctctctcctacagaaacaggcttgcatgctgatccgaaacctggtggcccacggccaggccttctcgaagcccatcctggacctgggggctgaggcactcatcatgcaggcccgatctgcccaccgtgactgtgaggacgtggccaaggccgccctgcgggacctgggttgtcatgtcgagctccgagagctgtggacaggccagaggggcaacctggcgccatgaccccaggcccagtctgggccgtgactctgggtgagtcgtgtgactcaggaatgggggtagatccatgtcctccactgtcccccattagttctgtccccttcacaatgagaagtgttttctggcaggccctaggtaaagggtcgggggaggggggagccttgtagggaggcctctacacagaagaaagcagcccccatgtcccagccacttctgggtcccagccagcagcacggatgttactgtcctgctccttcccccagccccacgccctaccagagggggcaaagggcacgtcccatcactcactgccctgtctgaaatgtggcagccactgtgggccaggctcagggcagggcaggcgattccagtggggttgggccccctggcgcctgctgcttactgcagtttcatgcaggcctctgctccttgtctttcttacctgtaaaatgggtctcagatgctccgccctgcttggccccagcttgtctgtctctgggtcctgggccagccaggatacctgataataaaagatcattgggtgaacagcggaggggtctcttccatagcttggctgagcatggggggccacagtcagtggcctcagagtgtgggggagagacagacattttggtggggggggccatggagtcactgaggatagcaaaggggttttgggaacagccagggatctaggatctgctgtcaccctcagacaggcaggcgctgaggccatggtcaggatcactgtttctgacgtgtaccacctgcagggccggagggctccacgttcatcccctactcagctctgcggccttgagcaagtgaaagaacctctccgagcctcaatatgctcctcctaaagtgaggagtgg

SEQ ID NO: 2542 - DNA, 2300 bp, Homo sapiens
  misc_feature (1)..(2300): DMR19:20295701
ttgagttgtatttttcactctaaattagtggtaattccagaaatttattgacataaaatattgcaacctccctctcccctctcccctctgcctctctttccacggtctccctctgatgccgagccgaagctggactgtactgctgccatatcggctcactgcaacctccctgcctgattctcctgcctcagcctgcctagtgcctgcgagcgccgccacgcctgactggttttcgtacttttttggtggagacggggtttcactgtgttggccgggctcgtctccagcttctaaccgcgagtgatccaccagcctcggcctcccgaggtgccaggattgcaggcggagtctcgttcactcagtgctcaatggtgcccaggctggggtgcagtggcgtgatctcagctggctacaacctccacctcccagccgcctgccttggcctcccaaagtaccgagattgcagcctctgcccggccgccacccagtctgggaagtgaggagcgtctctgcctggccacccatcatctgggatgtgaggagcccctctgcctggctgcccagtcggaaagtgaggagcgtctctgcccagccgccatcctgtctaggaagtgaggagcgtctctgcctggctgcccatcgtctgggatgaagtgaggagcatctctgcccggctgcccatcgtctgagatgtggggagtgcctctgccccgccgccccgtctgggatgtgaggagcgcctctgccccgccgccccgtctgggatgtgaggagtgcctctgcccggccgcgaccccgtctgggaggtgaggagcatctctgcccggccgccccatctgagaagtgaggagaccctccgcccggcaggggccccgtccgggagggaggtggggggggtcagccccccgcccggccagccgccccgtcctggaggtgaggggcgcctctgcccggcggtccctactgggaagtgaggagcccctctgcccggccaccaccccgtctgggaagtgtacccaccagctcattgagaacgggccatgatgacaatggcagttttgtggaatagaaaagggggaaaggtggggaaaagattgagaaatcggatggttgctgtgtctgtgtagaaagaggtagacatgggacacttttcattttgttctgtactaagaaaaattcttctgccttgggatcctgttgacctatgaccttacccccacccctgtgctctctgaaacaggtgctgtgtccactcagggttaaatggattaagggcggtgcaagatgtgctttgttaaacagatgcttgaaggcagcatgctcgttaagagtcatcaccactccctaatctcaagtacccagggacacaaacactgcggaaggccgcagggtcctctgcctaggaaaaccagagacctttgttcacttgtttatctgctgaccttccctccactattgtcctatgaccctgccaaatccccctctgcgagaaacacccaagaatgatcaatacaaaaaaaaataaataaaaaataaaaataaataaaagattaaaacacacacacacacaaaaatattgcagcttccacctgaaaatctaattgccaccaccaatttttgattcagtagtaccaggcagtaaaattaagaaacctacaaattgaaagtattttcttttttttttttttgagatggagtcttgctctgttgcccaggctggagtgcagtggtgcaatcttgggttactgcaacatccacttcccaggttcaagcaattctcctgcctcagcctcccgagtatctgggactacagatgcacatcaccatgctgggctaatttttgtatttttagtagagatggggtttctccatgctggccaggctggtctcaaactcctgaccttgtgatctacctgtcttggcctcccagaatgctgggattacaggcatgagccactgcaccaggcaaattgaaaatattttctaaatatttagaaattgctgttataaatttgtattttggtattaatttaccagaatattttgtcacatcgtctttgctgagcacattactagcttgtaattggagaatatgagcaagattcatgttatttatttttgataaaacaggtattgttgtcttaaagccagacctcatcacccatctggagcaaggaaaaaaacctttgactatgaagagacatgagatggtagccaacccctcaggtaggtgtgagtgaaaatgaatacaacagatgacacaggtaagaggtcccaaggtgaaagagaaagccagtcct

SEQ ID NO: 2543 - DNA, 300 bp, Homo sapiens
  misc_feature (1)..(300): DMR19:24223701
ctcaatgcgctcctatatatcctttcatagattctacaaaaacagtgtttccagacttctcaattgaaagaagggtttaactctgtgagaagaatgcacacatcacaaaagagtttgtaagaaagcttctttcttgtttttctctgaggatatttcctttttcaccacacgccacaatgcacaacaatatgtcccttcagagatctacaaaaacagtgtttccaaactgctcaattaaaagaaagatttaactctgtgagaaaaatgcacacatcacaaagggtttctgagaaagttact

SEQ ID NO: 2544 - DNA, 3700 bp, Homo sapiens
  misc_feature (1)..(3700): DMR19:24633701
agaaacttctttgtgatctgtccattcaactcacagagttgaaccttcctttttatggagcagttttgaaacactgttcttggagaatctgcacgtggatatttggagcgctttgaggcctgtggtagaaaaagaaatatctgcctctaaaaactagacagaagcattctgagaaacttctttgtgatgtttgcattcaagtaccagagttgaaccttccttttgatagggcagtttggaaacactctttttgtagaatctgcatgtggatatctggagcgatttgaggcctacggtcaaaaaggaaatatcttcctgggaaaaatagacgaaagcattctcagaaactgctttgtgatatgcgcattcgactcaccgagttgaaacttttttttgatagagcagttttgaaacactctgtagaatctgaaagtggatatttggagctctttgagggctatggcggaaaagaaaatatattcacattaaagtagacagcagcattcccagaaacttctttaggatgtttgcagtaaactcacagagttgaacatacctttccgtagagcagttttgaaacactctgtttttgggatccgcaagtggatatttggaccactttgagacctttgctggaaacgggaatatcttcacatataaactagacagaagcattctcagaaacttcttcatgatgtgtgcattctaatcccaaatttgaatcttccttttcatgaagcagttttgaaacactctatttgtgcattctacaattggatgattggaacgctttgatgcccatggtagaaaaggaaatatcctcatataaaaactagacagaaggattcacagaaaatgctttgtgatgtgtgcattcaaatcacggagttgaatctttcttttgtgagagcagttttgaaacactgtttctgtggaatctgccagcggacacttggttcgctttgagggctatggtggagaaggaaatatcttcccataaaaactagaaagaagcattctcagaaacatttatgtgaagcgtgcattcaactcacagagttgaaccttccttttgatacaacagttttgaaacactcttttgaacaattgcaggtgaatctttggagcgctttgaagcctttgttggaaaagggaatatcttcacacacaaactagccagaagcattctcagaaacttctttgtgatgtgtgcgttgaacccagagagatgaacctttcctttgatagagcagtattgaaacgtgtttttgtaagatctgcaagcggatagttggcttcgctttgtgtcctttggtggaaacgggaatatcttctaataaaaactagacagaaatattctcagaatcttctttgtgatgtgggcattcaactaacacagttgaacgtttcttttcacagagcagttttgaaacactcttttggtagaatctgccagtggatatttggagcgctatgagggctcttgtgccaacggaaatatctgcccctaaaaactagacagaagcattctcagaaactgctttgtgatgtttgcattcaactcacagagttgaacataccttttcatagagcagttttgaaaacctctttttgtagaatctgcaagaggatattcggaccactttgaggccttcataggaaacagtaatatcttcacgtaaaaactagatagaagcattgtcagaaagttctttgtgatgtgtgaattcaactcacagagttgaaccttcctttaatagagcagttttgaaacactctttttctagaatctgcaagtagatatttggagcgctttgaggccatcgttggaaactggaatatcttcacataaaaagtagacagaggcattctcagaaacttttttgtgatatgtagattcaactcacagtgttgaacctttctttggatggagcagttttgaaaaacccttttatcgaatctgcaggtagacatttggggtgctttgagggctgtggtgcaaaaggaaatgtcttcccatagaaactagactgaagcattctcagcaacttctgtgtgacgtttgcattcatctcacagtgttgaacatacctttccatagagtagttttgaaacactgtttttgtagaatcggcaagtggatatttggactgctttgaggccttcatcggaaacgggaatatcttcacataaacactagagagaagcattctcagaaacttctttgtggtctgtccattcaactcacagagttgaaccttcctttttatggagcagttttgaaacactgtttttggaggatctgcaagtggatatttggagcgctttgaggcctacggtagaaaaagaactatctgcctatgacaactagacagaagcattctgagaaacttctttgtgatgtttgcattcaactaccagagttgaaccttccttttgatagggcagtttggaaacactctttttgtagaatctgcatgtggatatctggagcgatttgaggcctacggtccaaaaggaaatatcttcctgggaaaaatagaggaaagcattctcagaaactgctttgtgatatgtgcattcgactcaacgagttgaaacttttttttgatagagcagttttgaaacactctgtagaatctgaaagtggatatttggagctctttgagggctatggcggaaaagaaaacatattcacattaaactggacagcagcatactcagaaacttctttaggatgtttgcagtaaactcacagagttgaacatacctttccgtagagcagttttgaaacactctgtttgtgggatccgcaagtggatatttggaccgctttgagacctttgctggaaatgggaatatcttcacatataaactagacagaagcattctaagaaacttcttcttgatgtgtgcattctactcccgaatttgaatcttccttctcatgaagcagttttgaaacactctatttgcgcaatctactattggataattggaacgctttgatgcccatggtagaaaagaaaatatcctcatataaaaactagacagaaggattcacagaaaatgctttgtgatgtgtgcattcaaatcacggagttgaatctttcttttgttagagcagttttgaaacactgtttctgtggaatctgccagcggacacttggagcgctttgagggctacgatggagaaggaaatatcttcacataaaaactagaaagaagcattctcagaaacatttatgtgaagcgtgcattcaactcacagagttgaaccttcctttggatacaacagttttgaaacactcttttgaacaattgcaggtgaatctttggagcgctttgaagcctttgttggaaatgggaatatcttcacacacaaactagccagaagcattctcagaaacttctttgtgatgtgtgagttgaacccagagagatgaacctttccttggatagagcagttttgaaacgtgtttttgtaagatctgcaagtggataattggcttcgctttgtgtcctttggtggaaacgggaatatcttctaataaaaactagacagaaatattctcagaatctcctttgtgatgtgggcattcaactaacacagttgaacatttcttttcacagagcagttttgaaacactcttttggtagaatctgccagtggatatttggagcgctttgagggctgttg

SEQ ID NO: 2545 - DNA, 1300 bp, Homo sapiens
  misc_feature (1)..(1300): DMR19:28013401
tccatcaccttaaagaaaaaattgttgctgcagaaaggcaaagagaaaaaaaagtcagttctcacctctcaacttcaaaccagactattgaaaccaatggcttggtgtcaccaggggcccttctggaagcagacacacagagctgaaattgagagtttaatgagttaaggagctatttacagagatttgggccacgttcagggtaacacatagccactggcatcgggacgcctttatcaccttaagctagaggagtgaaagggaagagaaagtgtgttaggttgtccttgcattgctataaagaaatacctgaggatgggtaatttgtaagaaaagaggtttcatgggctcatggttctgcaggctgtacaagaagtagagtggtatctacttctggggaggccccagggagcttttactcatggtggaaggtgaagcaggagcaagagagagagggagcaggtgccacatacttttaaacagccagatcttctgagaagtcactcactatcaccaggacagttccaaggggatggcactaagccatttataaaaaaaaaaaaaatcacccccatgatctaatcacctcccagcaggcccccctgtgacattgggaatcacatttcaacatggggttcagatggagacacagttccaaaccataccagaaagcctagcagaaaggactgcttggcaggagctgtgacattcagccggggacccagcagggatggagctggaggaagacatgcccctctttgtgcttgtcttcctttagactctgctagggccacccttgcctaaactcatccaggaaccaggaggcaagggagccatggataaagcccttgcagcggagccacccagagcagagtgaggggcaaagcgaaggcctccagaatggaccaacactggcttcagagaaggaagcttagaaggacctcagcaatgcatttatgccacagcaataaatgtgggaaaaacataataagaagttctcagagccagttttccctccctctcccatcttcatccctcaaaacagataaagacccttgaaactggggcaaaggacaggcattcggggtggaaggtagtgggtggcagggttgaagaagcccactgagggctctgtcatactgaagtaaaagtgagactccactctagaggtgaggctcagacactggaccaaattaaggactggctaaaatagggcctgggcggaagcagctttccataagacatacccaccagtgtgccacatcagcttaccattaccgtggcaacacctggcagttac

SEQ ID NO: 2546 - DNA, 1700 bp, Homo sapiens
  misc_feature (1)..(1700): DMR19:30870801
taaaaatccttctgaattccataatgtgccaagaaaaatggggaaaaattaaggaggcccctaccttttaatcattctgttcataaagtgctttaactgcacgccaggaaaaaaatggaggctctggtgtctgaggtattctgtgccataaactcccataatagaaacagatggtgaaactgccttggaagtgaagaaactagtgtacacgcagctcaccctaacatatgaagagattcagggctgacacatgaaggaatgcatttggcgtggtgccagcagtacactctaattcagccgtgagtgttcaagcttgagatgggagacccacaatttcaggatctggaatgccggcagctccaggatttagaatgccgtggaaggttcttgggctctttccatcctgccatggaggacggtgttctcagtgtttcaggtgaccgtgagttccaacagagagctcttcctggcttttataaatggttcataaaaacaatagtggagaaatgccaggtttgctggagcttcctttaactaagttaggatttgctttttacctagagctgccgccagtggatgctgaaagaagagaaaatgtgcaggacaaagagacatcagtgaaaatgatattagacggaaagggaaggaccctggtgccagccccacctgtgaccctagttgattggatggcacgtgcaggcaaaggagcctctcttggatatcgtgttttcccaagaaaattgaacacatttccatgttgtatcccaatggcattaatacatgcatttttttttctatgtgctgtattagttagggtgggttaaattctgttacacagaccccaaaacgtagcgatgcaaacacaatggaagtttacgtgtcctgtatacagcagtctagggtgtgcaaagtggtggggaggtctctgtccaccttgaggctccccatccagcggggtcttttcacctccagcacccagcaggtgggagggagagagcacagtggaggcccactgctgccttcagagctgattcccagagttctacattccccttcgactcataatccactggtcacaaggacttgagtgccacagccttgcacgtagacagagaagttttgatggacagctgcattgtggcacgtggatgtattaactagatgttctgtcgtcccaggagggtcttgcatgttctccccacctattcaagcctgtctgaaattgatgctctcttttcccttccaggaaatgtggtgtcctctgatcctccttccttcctgagaactggggtccttgcagatccgccaagtccagaggtgcccagtggccctgcatttccttccaccagagtcagctgaattcagatcaaaacttagaagaacgttcctccctccacgggactcagccctgaggctggggtggagctggggaccagacccagtggaaccctcattgtttatcctctctcatctctgatctcaggcactcaggtcccaaccgttctcttcctagcctctttacttctatggaaatcactcagacattgagagacccctgttgtgagaggttgggagactcaagctctacaagcacaagccaatctcagctgaggctgagcctgaactattccttgtgtccctgcaacaattctccttctcagcactggcaaatgatgtttgtttcccaaaagcaaggaaca

SEQ ID NO: 2547 - DNA, 300 bp, Homo sapiens
  misc_feature (1)..(300): DMR19:31835101
tgacataaaaacagacacatagactaatagaacagaacaaagaaccaagaaacaaacaaatccacatgcctagagttaacttattctccacaagatgtcaaaaacatacactggggagactcagtctcttcaataaatagtgcagggaaaactggggatctgtatgcagaagaatgaaactagacccctatctcctgccacataaaaaaatcaactcaaaattggttaaacacttaaattaaacattggagacactcttcaggacattggtctgggcaaaaatttcttgagagtacttga

SEQ ID NO: 2548 - DNA, 2600 bp, Homo sapiens
  misc_feature (1)..(2600): DMR19:32414201
acgaggttaggaaattgagaccatcctggctaacacggtgaaatcccgtctgtactaaaaatacaaaaaaattacccgggcatggtggcgggcacctgtagtcccagctactcgggaggctgaggcaagagaatggcgtgaacctgggaggcggagcttgcagtgagccgtgatcgcaccactgcactccagcctgggtgacagactctgtctccaaaaaaaaaaaacaaacaaacaaaagaaattagccaggcatggtggcacatgcctgtatttccagctactcaggaggctgaggcaggagaattgcttgaactcaggaggcagaggttgcagtgagctgagatcatgccactgcactccagcctgggtgacaaagtgagatttcatctcaaaaaaaaaaaaagaaagcttgtaaagcgattccctagaattaaaccatgtagtgcgtatatattaacataagtattttgaaaaaaggctgaaatatctctgtgtgagcagatagcccaaattgaatgctaacaaccgtatagcaaggagacatgttgaaagagatcatataacttaattataaactattaagtgtagctctttaatttaaaacttgtaaccagccttcctactttccttaaataaatacaccccatcatcaagaaacttgaacacccttggtttttctctctttactttcactgggttaaggaagttctagttttacctagtatttactgagcacctgttctgtgggtaacattgagttcaacactgcagagaacatggaaggaataacaaagatttctgaatttaccagcagattttccagtatagtaagtgaattgagtaaatatatattaagcacctacagtatgccagcaggcactgtgcttagtggtagcagtatcactgagtaagataaggccatgcccccaaggaacttacactcttgagaaggatacaggtcagtatccagacaattacaggacatcccaactcggtgctaggatggggtgagatagagagcactgtgggagcacataggagtggaagcctaacctcattttggaagatcagggaggcttttctagaggaaatgatggttaagtagacctgaaggatgagtaagagttaaccaggcaagttggggaggaaagatgagtgtcctagaagagggacaagtgcaggaaattcaagacgcaagagagcctggtgtgtgaagcgttggcagtagttcagcctggctagagagtacaaggggagaggggatgtactgggaatggtaaacagaggccagataataaagggtctgtcttctctgtctcaaagatagaactctctctgaatgtattatagtagtgaaccctatttttagtagaggcagcgatgtcatcgtattggcgtttcagaaagttgccttaggctgtgatgtggaaaatggatttggggagagcaaaactaaagtcaggaaactgctaagataatccaattcagtggattcagtaatatttaaatattgcattcaaatattcagtgagtatcttctgtatgccagacacttttctaggccctgggaataaagcattgaatacgacatagaacttaattatgatgaaaaggggaaaaatcagaaagaaaatgaaaatgaatcctacggtgaaagtcacacgggatgatgagatagtcactagaaggctacttggaattgggaagtaaagccgaccactttgaggacatgtaaaccaaaacctacatgatattatagaaggaaccagccaagctaagatctgcgagaacattctaggcagaggaaacagcaagccaaaagtctctaaggtaggaatgaacttggcaaatccaggatcagagagaaggtgcatgtggccagagttttatgagtgatgaggagaaggtagaagagaggagaagaacagatcacttagggctttgaggctgcataagagttgcagagtcgtgaacagagtcagagctttttaggaagtggacttggaaggatgtcttgattcattgtgtggaagtctgttgagagagaacagttgagaggctgtcagtccaagctgcttgctctccttagcagcggggtggatggatggacatgccattttctgtgacaacgagcaccgggaggagcagagctggaggatcagtaagttctgacaccagctatccaccgttaggccaaaccccacaggatgagggcacagctctctacaaaaatgccttcgtttcacacaccagtggcacgtttggggcccccccaggcaaccctcacttctgaccagctggctacaaattctgaggttcccaccacccactcaggttcaataattcactagaacaactgacagaattcagggaagtgctatattatgactacagatttattatagcaaaagattacaaatcagaacgagccaaagggagtgacacatgcagccaagtcttcgagggtcccattggaagctttcattatcttttccccatggagtcaggcctgttaccctcctggcacatcactgtgttacactatgtggagccaaccaaagaagctcttctgagtactggtgtctagtttttattga

SEQ ID NO: 2549 - DNA, 1200 bp, Homo sapiens
  misc_feature (1)..(1200): DMR19:34774301
cagcccccagggaagccagaaccaggcacaaaccagatggcccagcttatgcccagcaactcagggtcaccagatcttgtctcatcaagacactttcagcccaccacccaaacctgtagcccacatgaagagggcaataatcctggacactgtgaaaagtaaaagcattacatccaaagaggcatccccaggatggagcagaaataagaaaacataatgaagacacaattttgcaatcacttctgcctatattccatggcctacaaaccactcaaatagctccacatgtaagagaagccaggatgtgctgtcctccagagcatccagaaagagataatgggactgataagtccttggccattttctagtaaaatctattaatttagtcatcagatttccattctattatttatcctatacattctacactctcacatgcttcttaatgcgagaagccaaaatctgcatgcagtctctgacctcatctgaatgttaagatctcagggtgatatgttatgcatctagtccagattttgggtggggatgcagccaaaccatataatattatggggcctgttgggaggtgactggatcgtgagggtagatttctcatgaatgatttgatgccatccccttggtgctattcttgagataatgagttttctcaagatctgactgtttaaaagtgtgtggcatcttcccctcactctctcttgctcctgctctcaccatgtgctacactggctccccctttgccttgcaccatgattggaagcttcctgaggcctcaccagaaattgagcagatgctagtgctatgcttcctgtacagcctgcagaactgtgagccaagtaaacctcttttctttgtaaattacccagtctggggtattccttcgtaaattacccagtctcaggttttcctttacagcaaagcaagaacaacctaacacatttaccaacttatgaatggataaacaaaatgtgatatatccttataacagattattcagccataagaaaagactgcagtgctgatatacaatacagcatggaggaacactgaaaacatgtaagtgaaaaaatcagctacaaaataaccacacagtatataattccatgtatatgaagtgtgcaggataggcaactctatagaggttgaaggtagattagtgattgcttagggatggtgggtagtggt

SEQ ID NO: 2550 - DNA, 300 bp, Homo sapiens
  misc_feature (1)..(300): DMR19:34840601
cctgcctcagcctcccaagtagctgggattacaggcgcccaccagcacgcccggctaatttttgtatttttagtagagacggggtttcaccatgttgtccaggctggtcttgaactcctgacctcaggtgatccacccacctcggcctcccaaaatgctgggattacaggtgtgagccactgcacctgggcctgtctcattttttagaaagacttttcaggatcctggtcaatattgacaatttatcaatattgacttttccagtacaggagcatgatatatgtctccatatatttaggt

SEQ ID NO: 2551 - DNA, 300 bp, Homo sapiens
  misc_feature (1)..(300): DMR19:36779901
tatcgtgatcaatactatgaaataaatcaataggtggtataagcagtaacttgagggatacttcccgtagcattgataggacaggtgactgagagataacccttgagctttggtggtgaggagtcagcagtgtggaagggtattccaagcagaggcacagttacactaaagatgctgaaaaatcagagagcacttggagcattccagaaacagaaagcagcctggtgtgactgaagcttagcaagtgagtgggaaattagtttagatttaggatgcagaggtcagcattttccatatcat

SEQ ID NO: 2552 - DNA, 2500 bp, Homo sapiens
  misc_feature (1)..(2500): DMR19:37842601
aattttcacaacctactcatctgacaaagggctaatatccagaatctacaatgaactcaaacaaatttacaagaaaaaaacaaacaaccccatcaaaaagtgggcgaaggacatgaacagacacttctcaaaagaagacatttatgcagccaaaaaatacatgaaaaaatgctcattatcactggccatcagagaaatgcaaatcaaaaccactatgagataccatctcacaccagttagaatggcaatcattaaaaagtcaggaaacaacaggtgctggagaggatgtggagaaataggaacacttttacactgttggtgggactgtaaactagttcaaccattgtggaagtcagtgtggcgattcctcagggatctagaactagaaataccatttgacccagccatcccattactgggtatatacccaaatgactataaatcatgctgctataaagacacatgcacacgtatgtttattgcggcattattcacaatagcaaagacttggaaccaacccaaatgtccaacaatgatagactggattaagaaaatgtggcacatatacaccatggaatactatgcagccataaaaaatgatgagttcatgtcctttgtagggacatggatgaaattggaaaccatcattctcagtaaactatcgcaagaacaaaaaaccaaacaccgcatatactcactcataggtgggaagtgaacaatgagatcacatggtcacaggaaggggaatatcacactctggggactgtggtggggtggggggaggggggaggggtagcattgggagatatacctaatgctagatgacgagttagtgggtgcagcgcaccagcatggcacatgtatacatatgtaactaacctgcacaatgtgcacatgtaccctaaaacttaaagtataataaaaaaaaaaagataggaatgaaaatgaactactagtatttgcaacaacatagatgaaactcaaaaacttaatactgagtacaagaaggcagacacaaaacagcacgtattgtatgattccatctatatgaaattctagaaaagagtcatctaggccgggcgcagtggctcacgtctgtaatcccagcactttggggggccgaggcaggtggatcacgaggtcaggagttggagaccatcctggccaacatggtgaaaccccatctctactaaaaatacaaaaattagccaggcgtgatggcgtgtgcctgtggtcccagctactcagaaggctgaggcaggagaatcgcttgaacctgggaggcggaggttgcagtgagccaaaatcatgccactgcactccagcctgggtgacacagtgagactccgtctcaaaaaaaaaaaaaaaaaaaaaaagtaatctagccaacagggccagaaagtagatcagtggttacatggggcaaagatttaggaggactgagtgggaagggatgaaagggaactttttgtagtcttgtaatgttctgtatcttgactctggtagtggttacatgggtatagaaattggtcaaaactcatcaaaaaaatatggtatactttattacatgaaaattatacctaaataaatttgattttatttgtttgtttagaaagtcttgctctgacactcaggctggaatgcactggagtaatcaaagttcactgtaacctgcaactcctgggctcaagggatccttctgccttagcctcccaagtagcttggactacaggcacatgccatcatgctcagctaatgttttattttttgtagaggtggggtcttgctatgttgcccaggctggtctcaaactcctgccctcaagcagttctcctgcctcagcctcccaaagtgctgggattacaggtgtgagccaccacactcggccttaatttcatttttaagagggaatagagtgacctggcacaatggctcatgcctgtaatcctaacactttgggaggctgaaacggaaggatcacttcagctcagaagtttgagaccagcctgggcaacataatgagaccttttctctaaaaaaattttcaaaaattagccgggtgtggtggcaagtacctgtagccccagctactcgagtacctgaggcgggacaagtgcttgagcctgggaggtcaaggctgcagtgagttgtgatcatggcaccgcactccagcctggatgataaagcgagaccctgtcctaaaaaaagaaaaaagcgaggcgtggtggttcatgcctgtaatcccagcactttgggaggccgaggcgggtgaatcacaaggtcaggagttaaagaccagcctggccaagatggtgaaaccccgtctctactaaaaatacaaaaattagccgggtgtggtggtgcatgcctgtaatccaagctactagggaggctgaggcaggagaatcgcttgaacccgggaggcggaggtttcagtgagccaagattgcgccactgcactccagcctgggcaacagagcaagactccatctcaaaaaaa

SEQ ID NO: 2553 - DNA, 1300 bp, Homo sapiens
  misc_feature (1)..(1300): DMR19:37956701
cttgaactcctgacctcaagtgatccgcccaccttggcctcccaaagtgttgggattacaggtgtgagccaccacgcccaccctaatataaaagtttttaattttggaaattccgtttatcaattagtcttttatggattgtgcttttggtattatatttaagaactctttgacccagtatcatgaagttcttctttcatgttttctcctagaagttgcatacttttaactcttgcctttgaatctatcattaattttgatatcatttttgtgtattacataaggggcctaaatttatctttttgcgtattaatatccaattatcccagctccatttgttgaaaaaaagaccattttcctccactgaattaggtagcactatggtaaaagtcatttgattattaatataagggtttgtttcttctgatctattggtttaaatgtctatcctactgctagtgccacagtcttcattactgtagctttaaagttactttagaaatcgggaagtgttaagtcctcaccttgttttgttttccaaaattgttttggcttgtgtgggtcctttgcatactgacaagttttcagatcaccttgtcaatatctgcacaaaagcctgctgggatttgatagactgtgtgttgactctacatgtcaatatggtgagaattgccatattaatgtttagtcttccagtttgtgtacaaagaatgcttctctgtttatttagattgtctttaatttctttcagcttttcagtgcttgtagctttcagtgtacaagtctacacttatgttaaatttattcttatgtattttttttatgctattgtgaatggaatttttttttcttttttttcttttttcttttcttttgagacaggatctcactgttacccagtctggagtgcagtggcacaatcatggccttttgggctcaagcagccctcccatctcaacctcctgcatagctaggactataggcacatgtcaccatgcccagctaatttttaatttaatttaatttattttttgagacagagtcttctgttgcccaggctggtgtacagtggcataatcacagctcactgcagcctcgacttctgagctcaagtgatcctctcaccttagcttctggagtagctgtgactataggcatgcatcaccatgcctggctaattttttttttatttttgtggaggcagggttttgccgtgttgcccaggctggtcttgaactcccaggcccaaacagtcctcctgcctcagcctccaaaagtgctggaattacaggcatgagcc

SEQ ID NO: 2554 - DNA, 4200 bp, Homo sapiens
  misc_feature (1)..(4200): DMR19:38340401
gcctacacattctgggttcaagcgattctcctgcctcagctgcccaagtagctgggactacagatgtgcgccaccacgcccggctaattttgtatttttggtagagatggggtttctccatattggtcaggctggtcttgaactcctgacctcaggtgatccacctgcctcggcctcccaaagtgctgggattatagatgtgagccaccgcgcccggccaataattttatttttttagagacagggtcttgcgctgtcacccaggctgaaatgcagtggcttgatcatagctcattgcagcctcgacctcctgggctgaagtgatcctcctgcctcagcctcccaagtagcagggactacaggctcaagccatcacaccagtgtactttcaattagacagggtctcactatgttgcctaaggctggcatgaaagaatttctgagagtagtattaataaatgcaaataataaaatgaggtaatacgttagaaaggaggggggggcactgttttagtgggggtcgttggagaaggtcactctggaaaggcttgagcagagactcaaatgataaaaagtggggattattaggagagccaggtaaagctttccaggccgagggaagagccagcacgatggcccagaggtaggaaagaggtcagcatgtgtgagaaactatgaagaggactttgtggctggagcagagtgagtgagagggagtgtgggaggagaggtcagggaagtgatgggggaaggtttttggggcttgatgggccatggtgaggacttggcttttactctgagacagagcctgagagggccctatgcagaggagggattggatctgattccaggcttcactggctccctcctgttgttgggggagcagggcaggagcagtgagacaaggaggaggctgctacattgcccaggcaggagatgacggggacaggaccagggtgttagtggctactgtcatcctcacaggaaggaggtccctgccccactagcaccttctcctctgcaatgggaactcaggcagggccagggacaggtgtagttgacaggattgaaaagagcctggtgctgggtgtggtggctcatacctataatcccagcactttgggaggccagggagagaagattgcttgagcccaagaattcaagaccagcctggacaacatagggagaccctgtctctacaaaaaaaatcaaaaaattgggccgggcatagtggctcatgcctgtaatcccagcactttgggaggccagggcaggtggatcacctgagttcaggagttcgagactagcctgaccaacatggtgaaaccccatctctactaaaaatgcaaaaattagccgggcgtggtggcgcatgcctgtaatcccagctacttgggaggctgaggcaggacgatcgcctgaacctaggaggcagagggtgcaatgagctgagatggcgcccttatactccagcctgggcaacaagtgcaaaactccgtctcggaaaaaaaataaaaaataaaaaaattagccaggcgtggtagtggtacctgtagtcccagctatttgggaggctgaggtaagaggattgctgaagtctgggagaggtggaggttacagtgagctgtgatggcaccactgcactccggactgggcaacagagcaagaccttatcttaaaaaaaaaaaaaaaaagccaggtgcagtggcttacacctgtaatcctagcattttaggaggctaaggctggaggattgcttgaggccaagagttcaagaccaacctggccaacatagcaagaccctgtcccatgtaaaaaataaataaataaataaataaataaataaattacagaaatagccagcctgggcaacagagtagactctgtctctacaaaaattaaacagttttcaaagaaagaatggcctggtggctcatgcctgtaatcccagcactttgggaggccgaagcgcgcagatcagttgaggtcaggagtttgagaccaggctggccaacgtggtgaaacctcatctttactaaaaatacaaaaattagctgggcatggtggtgcacgtgtgtagtcccagctactcaggaggctgaggcaggagaatcacttgaacccaggagacagaggctgcagtgagtcgagatcatgccactgcactgtagcctgggcgacagagtgagactccttcttgaaaaaaaaaaaaaaaaggaaaagaaaggagcctggcaaagaaagtaaagaaagtcagccctctcgatgaagggctgtgcacaggtgctgaatctggtaaatccctcgccctggtcccacagcaaccaaggcctccccttggtggcctgagtgccgccttctctcggggacgcctcttagccttcactggtgctgttctgcatgcctgaaacatccttctcctcttctcccatctccactctaagcgctccccacccttttctattcagccaggatcccgcatccctgggaggttgtccaggcatgccctgtcaccctcgtcctcagtcccttcctgtgtaatcgccccatcctacactcaccccaagctcaaggcccagaacttggctgtcctctgacttgcataggtggcagaaagtctgctgcagagagggtggaagcccacctcaagagtgagactgggggccagatgagatggctcacgcctttaatgccagcactttgggaggccaaggtgggaggctcacttgagaccaggagttcaagaccagcctgggcaatctaattttttttttttaagcctggaactgggaatccctggagtggaaagcagcaccctgggtgccacatccctcccaccttcccagcatccctcccacctgcacagttttgttcatcccatgctgcccttccctatgtattccctacatgcacattctgtctgcagacactggctctggagtcatctcctccaggaaggcctccgactccctccacagccccttacccctctgccccctcctaggctgttccatcccccatccaagccccaaacctagaccatgtcctctgaccatcacatggtggacagtgtgctgcccccggacagcccaggagacagactgttagaggcgggcttaaggcagggggcacccagaggctaccataaggacacacttgtggggccatctcaccctcagccctctgaggacctggtgcgcatgggccacctgacggggctaaagcccctggtgctggtcaccttccagtccccagtcaacttctaccgctggaagatagagcagctgcagatccagatggaggctgcccccttccgcagcaaaggtgggcctgggggaggcgggagggatcgcaacctggcaggggtgtggggtttgctgggggcctctgtggggccatgatctgaggagggtatgtggggggcgggagctcagcacattccatggcctagaggggccacacagaggccccagtgggacccatggcgtggaggcaggtatggggagttgtggggagatcccagggtggtctggggcctggaaccggccattgggaggccccagcagtttcagtgcccagggcctccctgcagagccatgcatggcagaagaagtgtgtagcatgagctggtacacgcccatgcccatcaagaaaggcagtgtggtcatgcgtgtggacatcagcagcaatggcctggggaccttcattccagataaaaggtaccctttcccaagacgggggctggggtggactccgggggaattcctcaccccagggtccccagaggagccagtgggagatccaagggagagaatggggagaggagaggcagctacgagctgtggaacccctgacactgggacctcacctgcgcctattctgcacctgctgctaggttccagatgaatatcaacggcttcctgaagagagaccgggacaataacatccaattcactgtgggagaggaggtgagggaatatggcaggggaaaaagacaatggtctgggccttaggctgacgccctggttacttcccagacaagcagcagatcccatttagggagcaccaacttcatgccaggccccacatgaagatcccattaatctccccagtgacctgtcgaggggacgtactctcacatactccattataaagaggagaaaactgaggtcccaaagggatggaaccattttcccatag

SEQ ID NO: 2555 - DNA, 2000 bp, Homo sapiens
  misc_feature (1)..(2000): DMR19:38472701
aaccccgtctctaccaaaaatacaaaaattagccaggcgtgttggctcatgcttgaatccaggaggcagaggttgcagtgagccaagatcacaccattgcactccagcctgggtgacagagcaagactcttgtctaaaaaaaaaaaaaaaaaaaaaagaagtctgagaacaaagaatcttgtacgcacagtttttggggcaaattttcaggagactgagacacaagaatcatttgaaccctgtaggcagaggttgcggtgagccgagatcctgctattgcactccagcctgggccacagagcaagactgtgtctcaaaaaaaaaaaaaaaagcattgaagttgagctgcctggttactggttacagaatgacagagtagattgttagatggatgtagggaggttttggaagttaccccaagtgattccagtgtgtgtccggggctgctagtgtacacgacgcccagagaaatgttgcagagggctgcaagcaccccagggcccagcggtgtacccggccgggagcttcatccccctgcaggagtggggggcccttgactaattcccatgcaggtgcactatggcctaatggtggctccgtgtgtgaccaggtgtaggaccaacggcctggcctagcccgcctgcccagcccagtactccattccctgccacctcaggtatcccgagtggacggcactgtggacacgcccccctgcctgcgcctgacccaccgcacctggggctcccagaacagcctggtggagatgcttttcctgcggctgagcctcccagtccagttccaccagcacttccgctgcactgcaggggccaccccgctggcacctcctggcctgcagccccccgccgaggacgaggcccgggcggcggaacccgaccctgactacgaaaacctgcgccgctcagctgggggctggagcgaggcagagaacggcaaagaagggactgcgaaggagggcgcccccgggggcaccccgcaggcggggggagaggcgcagcccgccagggcggagaatgagaaggatgccaccaccgagaagaacaagaagagagggtgagtcgaggggggcccagagtggggattgggggctgccttgggacccccaagtaggcaaccacagtaacctgagaaacccccattgtaccccaaagtagacccatatatgctaagtggagtaagaataccgagagattctatcatgtctccaatgaaccccattattttcctgggatgccctaatgtccccaagaatatataattgggtaccctagtatctatatggagaactctattatccttgagtacctggagggccccaaagggcttcgcccaatggaccttatcatccgtggacactaaaagggacttcagtatcttcctaggagagtttactgcacagtaaggtatcccagtgaatacccagtggtcttctaaatggggatcctttctgtgtcacaaatgtaccccccgaaatctaacttaaagggagattctgagaaggtactaaatctgctttttccctacaatggcagtggtttcctttttttctttctatctttttttttttgaggaggaatctctgtcgccaggctggaatgcaatggcgcaatctcagctcactgcaacctccacctcccgggttcaagcgattcttctgcctcagcctcctgagtagctgggattacaggcacgcgccaccatgcccagctaatttttgtatttttagtagagacggggttttgccatgttggccaggctggtctcaaactcctgacctcaggtgatccacccacctcagcctcccaaagtgctgggattatagacatgagctaccacgcccggctccttttttttttttttttttttttttttttgagatggagtcttgctctgttgcccagtctggagtgcaatggcacgatcttggctctctgcaatctccgcctcctgggttcaagcaattctcctgcctcagcctcttg

SEQ ID NO: 2556 - DNA, 700 bp, Homo sapiens
  misc_feature (1)..(700): DMR19:43005301
aatcatagcttggcactgatcacgattggattgaagaatattttttccaattttacacatgaacaataaaccaatagcacaaactgtctaaaacttcagcactgggtaaaacagttaagagtgcttgagaagcttcaaaaatctgttcttttagcttccttatgtctaaacttaaattatcttcacttccttgtaaatggcattttacgattcccaattgtgaacagactcattatattggaatggagttatacaaaaatcagaagtattccaatcacgttgcatttgtaatctatgttctaatctcataattctatctcccatccatataacagaagcacatcacgcgctgtaggctcattctggcagcccaacctggcattgtctttacacaatcctgcatgcaattttgtatttatcataatcaggagcatttcatcatttattctatagcaatagtttcggtgggtctccctacaggactacaggtgtgcaccaccatgcccaggtaatttttgtattttaactagagacagggattcaccatattgaccaggctgatcttgagctcctgaccttgtgatccacctgccttggcttcccaaagtgctgggattacagatgtgagccactgtgcctcgcccataaatcacacatttctttgagtttttgtaattccagcacaagagaaaccatttga

SEQ ID NO: 2557 - DNA, 400 bp, Homo sapiens
  misc_feature (1)..(400): DMR19:43206901
tggctgattcccggggaggctgtgggccctcaggcagccgctgttctgtgtcagcgctaggcttggcctgggatgccccagagaacaggacagatggagcaggggcgggcatttagggagcagtgacagaaagagttgatgaggatggagggaggtcacgaggggaaagcgtccagtgtggcgtcgcgtgcaccatcgctgcccgggagatgcctttagctgggcccagggaaggagcaggtgtgtggggcaggagctacctgcagagggagtggtgttaggttggcggctgcgggtcaggaaggagctgacagagtccgtgttgggagcatggagggctctgaagacttgggccgaagtgaccctggtgagggtggaccctgctgggctgtgggttccg

SEQ ID NO: 2558 - DNA, 900 bp, Homo sapiens
  misc_feature (1)..(900): DMR19:45466501
agaccatcctgaccaatatggtgaaaccccgtctgtactaaacatataaaaattagcttgacgtggtggcccgcgcctgtagtccagcaactcgagaggctaaggtgaggcggaggttgcagtgagccgagatcgccactgcactccagcctggcggcagagcaagactccgtctcaaaaaaaaaaaaaaaaaaaaaaaaaaaaagacctgacaagtgaaagctactaatattgccattatcatttaaaaaaaccccagacacaggtttttcagggagtttcatccaaccaggcaggtctcagaaatcagaaaagaaatggaaagggtaggaaatctggagtttgacaattctgagtttgaatttcttgtgatgggatcttgggcaagtcatttaacctccctgagtatcatttttttcttttataaaatgaagatttttctctcttaaccttccagagctgttttaaggattacaaatcttctactgaaaggcgtagcacaggagctgtgcttggcaagtgccaaatacaaggcattaattattattattagaattaataataatatcccctccctcttacacattctttgtctccgggtggattaaaaggtggaaggagaggctaccaacaccatcagaagagaggcttctctctaagtttcatttcccatctcctccaaatccgcatccctcccaaacgccggacctgtaaggccagcagggtccaagacacacatcctttgcccagcggggaagattaaagctaaagctcagagagggaaaacatttcctaagctcgcacagcgaatcaggacagaaaccaggacgagcctcggaatccctccattacctccactttcacctgagcatcacagcccgctcgggactcagtttcccc

SEQ ID NO: 2559 - DNA, 1300 bp, Homo sapiens
  misc_feature (1)..(1300): DMR19:45629801
gtggcaagcggcttgctcaagtcacacagccagcaaggagtaaagccagggcttaaacacgggtctatctgattgcagactcctaaccactgagattgggaaagtcccacagtggcacccagcaggaggggatgagaaaagtcacctcaccttgacatccaccaccttggtctccttggcccagtcccacaccgagagcatgtgatcattggattcatccactgcacacagcaggttgcctccattctaaagaggaggagagaggagggggacagaggcaaggggagtcagggcccatcctccccccatgcccaccaaggcattcaccacacaggcctgttttaaaaccttcaggctgggcacagtaggtgggaggatcgcttgagtccaggagtttgaggccagcataggcaatatagggagaccctgtctcttaaacaaaacaaatttaaatattaaaaaaaaataaaaagccaggcgtggtggctcacacctgtaatcccagcactttgggaggccgaggcaggtggatcacgaggtcaggagttcgaggccagccttgccaacatagtgaaaccctgtctctactaaaaatacaaaaaattagccaggcgtggtggcaggtgcctgtaatcccagctactcgggaggctgaggcaggagaatcgcttgaactgggaggcagaggatgcagtgagccaagattgcgccattgcactccagcctgggtgacagtgagagactctgtctcaaaaaaaaaaaaaaaaagaccttcaaaggccctggccattttgcaggaaacacattaaaatacaccctccattagaagctgtgaagacatctgaaatggtttcatactatgccttgaaatgactcatccctaataaactcatttcatttgccctcagctattgtttctctgcagccagcacccctagccaggaattcttgctgacatcatctcatttgcatttacatatatagagaatgactgatgtaggtgaaattcagcagttaacaaagttggtattatgttgggtttttgtttgttttttattttattttattttttgagactgagtctcattctattgcccaagctggaatgcagttgcatgatcttggctcactgcaacctccacctcccaggttcaagcgattctcctgtctctgcctctcaagtagctggcacatgccaccactgccctcctaatttttgtatttttagtagagacagggtttcactatgttggccaagctggtcttgaactcctaacctctggtgatacaccagcttcca

SEQ ID NO: 2560 - DNA, 1600 bp, Homo sapiens
  misc_feature (1)..(1600): DMR19:48181401
tgtgagattcatccgtgttgttggaggttgtaatggtgtgttcattcttggtgctgattagtgttttattttaggaatataccacaacttattttctcactctattgttggatatttaggtttcaagtatttggcgaatacacatagtgctgctatgaacattctcgtacacagctttagatgcccatttgtcttgagtggcaccactgggtcacaggagagacataaaatttgctttagtagatactgccatgaagttttccaaagtgcttgtgccatttcacgttcccatcagtgatgggtgagagttccagttgctccacgtcctcatcaacacttgatgttatcagtctcttttgtttgaccattctgctgatgtgtagtggcatttccttagggttttaatttgttatgtctttgatgactaatgagtttgagtcctttttcacgtatacaatgcttttaacacacagaaacatacctcccattgtttatgggtgcataaaaatatacatggaatgctaatagataattttgatagtggctgcctctggggacagagggaaggaagataatctgttagggcagcgttcacagaaggcctcaacttttgatgttattgctaaaccagaagcagatacaggactatctgaaattttttatttctaaaaaaagttaaggtaaatacaataaaacattcactcacttttgacagaactaagggtggtaggtatagaattttagtgaacacttactgcttgccatattccagacactgtgtaggtgctttacctatattaactcttttcatgctcatgacgatcctatgaggaaggtatgatgagtaggaccttccttgtaacctatgaggaaactgaggcatagagacttgaagtgacttgccccaggtcacacagctggcatattcttagggccctctactcttctctatgcctgaaacaattcttagtttaaaaaaaaaaaaaaggtgagtggaaaggaagaagagggcagcagagtgatgtgaccagggcggtggtggttcctcccacaggcctccccagcccggctgccccgccttcatcatcgtcaagctgagcccgctgcgggaccgcctcgtggtgacggagtgccagctgacccactcacacccggcctgcccgctggagttcgcctactacttccgcccgggccacctgctggccaacgcctgcctgccggtgcgcaccaccaacaagatctccaagcagttcgtggccccagccgacgtgcgccgcctgctgtcctactgcaagggccgcgaccacggcgtcctggacgccctgcacgtgctcgagggcctcttccgcaccgaccccgaggccaaggtggggtctcgagagaggcaggccgggggagggggcgggggaaagccgcgctgaagactcgtgggtcattcatgccttcatccgccctctcatcccttcactcctttcctccattcatccgttcattcattcaataagtacttaccgaggcattggggatgcagcagcaaaccagacccacgtggtctctgtccgcagagagcttaccttctagggtagtgctgcccagtaga

SEQ ID NO: 2561 - DNA, 200 bp, Homo sapiens
  misc_feature (1)..(200): DMR19:49061801
gccccagcctccagcaggaagagcagagggggcccagcaggggcacccctagacaggactactcggggggagagaaggtcccactcaggggccagaaaagggggcaatgttgagggtgggggttgggactcaattggcacactggggaggaggaaaaggaggaggatggggagggagcatgaggggagagggagcatctc

SEQ ID NO: 2562 - DNA, 2900 bp, Homo sapiens
  misc_feature (1)..(2900): DMR19:49753901
ttgagacagagtctccctctgtcccccaggctggagtgcagtggcatgatctcggctcactgcaacctctgcctcctgggttcaagcgattcccctgcctcagcctccccagtagctgggactacaggcacccgccaccacgcctggctaatttttgtatttttagtagagatgggggtttcaccatattggtcaggctggtctcgaactcctgacctcaggtgatctgcctgacttggcctcccaaagtgctgagattacaggcgtgagccaccgttccctgctacattatgatactttaaatggccagttttcaggccaggcacggtggctcacacctgtaatctcagcactttgggaggccaaggcaggtggatcacctgaggtcaggagtttgagaccagcccagccaacatggttaaaccccgtctctgctaaaaatccaaaaattagacaggcatggtggtgcacacctgtaatcccagctactggggaggctgagtcaggaaaatcgcttgaacctgggagtcagaggttgcagtgagccaagatcatgccgctgcactcaagcccgggtgatagagtgagactccatctcaaaaaaaataaaaaataaaaaatggccagttttcaacaaaaaagttataaggcatgcaaagaaaaaaaactatggcctatacaatggaggacaaacaagcagtcaagagaaactgttcaggggtaggatggcgggggcagatttggacttactaggcaaacactttaaatcagctactttaaatatgttcgaagtgctaaaggaaaccattcctaaataactaaaggaaattgagagaataatgtctcaccaaatagggcatatcactaaagagacaaacattattaaaagaaaccaaatagaaattatagggttgaagggccaggcgcaatggctcacacctgtaatcccagcactttgggaggccaaggcaggcggatcacgaggtcaagagatcaagaacatcctggccaacaaggtgaaaccccgtctctactaaaaatacaaaaattagccggggatggggtgtgcacctgtagagccagctactcgggaggctgaggcagcagaatcgcttgaacccaggaggcagaggttgcaatgagctgagatcacactactgcactccagcctggcaacagagagagactccgtctcaaaaaagaaattctagggttgaaaagtacaataaccaaagtgaaaaatgtactagagggggctctgtagcagaataatgattcagtgaacttgaacatagctcaactttgattatccagcctgagaaacatgaaaacaaaaagaatgaagaagaatgaatacagcctcagagacctatggatctgggagtcccagaaggaaagaaaggggcagaaagaatatttgaagaaataatggttgaaaacttccaaaacttgatgatttgaacataaatccacacatccaagaagccaaatgaactccaaataggctccaggggccgggccaagtgactcactgctgtcatcccaggactttgggaggctgaggagggtgtattacttgagaccaagagctcaagaccagcctggccaacatagcaaaaccctgtctcataaaaaacaacaataagaaggctggacatggtggctcacacctgtatttccagcactttgggaggccaagatgggaggatcgcttgagcccaggagtttgagaccagcctgggcaacaaagtaacacctgcgtctctaaaaataaaaatgaaaataaaaacacttttaaaataggataaaatgggccaggtggctgggcttggtggctgatgcctgtaatcccagcactttgggaggccaaagtgggtggattatgaggttaggagtttgaaaccagcctggccaagatggtgaaaccctgtctctactaaaaatgcaaaaattagcctggcgcggtggtaggcacctgtagtcccagctacttgggaggctgaggcaggagaatcgcttgaacctgggaggcggaggttgcagtgagccgagatcgtgccattgcattctagtgtgggcgacagagcgagactccatctcaaaaaaaaagaaaagaaagaaagaaaaccacagaccaatatcctttatgaatatggtcacaaaaatcatcaacgaaatactagcaaaccaaatccaacagcatgtaaaaaggattatacatggtgaccaactgggaattatcccaggaatgcaaggttggttcaacatactaaaatcaaccaatgactgggcatggtggctcatcccagcaatttgagaagctgagacaggaggatcacctgaggccagaaattctagaccagccaggtcaacatagtgagactccatctctaccaaaaaatttaaaaattatctgggtacagtggcatgtgcttgtggtctcagctccttgggatgctgaggtgggaggactgtttgagcccaggaggttgaggctgcagtgagctatgatggcaccattgcactccaacctgggcaatggagcaagactctgtctctaaaaacaaataaatgttacataccatattaatagaataaaagggaaaaaaaacacatgatcatgtcagttgagaaaaagcttttgacaaaataccactcatgattaaaaaaaaaaaaacactccacaaactagaaatagaaaggaagaaaggaacttcctcatcccaataaagggcagctacaaaaatcccacaaaatgtgatagtttaaaatatgtccataaattctttcacattcctttaaaacgtggagccttatttgcctcacttgagtatgagctggacttggtgactcacacccaggaaatagaataaggcaggctagttgtggtggctcatgct

SEQ ID NO: 2563 - DNA, 1100 bp, Homo sapiens
  misc_feature (1)..(1100): DMR19:51400301
gatgctgtaactgatgatacatcttcggatgtttggtgggcaccacacaggcacctgactgtcacctggagagacacaagcaaatcctcttccccatataattatctttcctttttctcagctctttgtatgtgcttccctccaccatatatcttgtccagactttttattttccttttctacattccttttttgtgtgtccaaattgcccacaattaaagcaagagcctgagaaacggggcacattccttcctactttcaatccagccatagcctgagctaaaagaggagccctatgcaaggtatctccaatgccatcgcaagccccagtatattcagccaaatgagccttccctctcataggtctgatggcagtttgacactctgcatcagcattttcatatgcaggaagctgtattacaacatcctgagctgttttatcagttatggctttatacacagcctcttggagccaagcaataaaatcaatatatggttctttaggtccctgtcggacgagctgaaagaaggatatttttccgctgtaacatttatcctttcccatgcccgtaagcatgcagggcacagctgaacaatggcaacatcctccattactgcttgattttctaatctaccccagttggggccaactcccatgaactgttcaaaggaaacaggcacaggtggctgcgcttgtgtgttttcccttgcctgagtttgagcttcatcagcccaccaagttttaaactgtaaatactgagacggagtgagaacagattttggtaaagtatcccaattatacggtattaacctagtatcaagagccacattttttaacaaagtttgcacaaaaggaaagttcggtccatattgagtaatggcttacttaaattcctttaataacttaaaaggaaaagtggcccaattagttatattctgtcctccttgctggattatagtaactggaaattgccatgcttcaaggtcttcctcagttctagctttttttttttttttttttaacagagtctcgctctgttgctcaggctacagtccagtggtgcgatctcggctcattgcaacctctgcctcccgggttc

SEQ ID NO: 2564 - DNA, 200 bp, Homo sapiens
  misc_feature (1)..(200): DMR19:52241001
cactgcactccagcctgggcaacagagcgagactccatatcaaaacaaacaaacaaacaacaaaaaccataatcataaagatatattcacaaaaaattcttatggaatataggagccaaatatgaaataatttatgctgatttcatttatatcaagtagcaaacagacaaatgtgatttaatctcttaaatactggaata

SEQ ID NO: 2565 - DNA, 4200 bp, Homo sapiens
  misc_feature (1)..(4200): DMR19:52916701
gcggaaaaggacacattgacaactgggggctggggggaatcttgtcagatctaagaaaacaggaaatgccccatcctagaggaagcaatcaccctttcaactgcctggcctggaggatgaagaatcacttgaacccgggaggcaaagtttgcagtaagccaagatcatgccactgcactccagcctgggtgacagagcaagactccgtttcagaaacaaacaacagaaataataataataggtggaatgagaatatagctttatcctctagaataaaaaaaaagtactgctcccatatttgagaaaaattgtaatcatttttaccaaaagcctgtttcacgagcctctccatagtaacaccactgtctccatgagcgtaatatgctaagaatggttgaatgaatctcctgctattatttatgttgattccatattcttaacataatgatggaatcattcatgtatcattcatttccattatatttatttatttatttaagacagagttttgctcttgttacctgggctggagtgcaatggtgcaatctcaggtcactgcaacctccgcctcccgatttcaagtcattcttctgcctcagtctcctgagtagcagggattgcaggcacacaccaccatgcccagctaattttgtatttttgctagagacagggtttctccatgttggtcagactcactcaattacctaaaaatgtagtttaatatcaggcagaaaacatttcctcttatcggtcttttctagaatttaccatgttctttgtgcacattaatatgtgacttccattggcagctactctaatcttggtccacagaaaactgacagtgcatccagatgcggccctgaacaatccctgccgcccaacaccactgacaccataggaccctcaccccgtctccatccatgtctgtgtgtgagcccttcccaggaccatgcctactgcaacctcttctcatgttcatgtcattgggtcacgagagatggaatctaggtgagatgagagggactgagggaaggcatgggtgagtgtgagcaaacctgtcacgcaggatgcttcagactcagagaagtttcccaactccaaggcccagcatttctgaaaggaaggagacagaacaatccacagagaatatcatctcacctgaggaagagccatccctgactcctttgctttcctcttcctcttctgagtttcttcttcacatacccagagtctttagaagtcaatcatgaatgttagaaatatgttgtttattgctcagagtcaacataccccctccctgtaaaacaacgacacatacaaaggagacctcaccctgggaaatatggtccactctgctgcccaccataccagggacaataaactcctataggaaaactcccactccccttctggagaagcccacacacacgctgcagcagtagggatctgggctggaatgagctccccttcaaggcacagacccagacctgaccaaaccacttgcagaggctgggtgcggtggctcatgcctatcatcccagcactctcggagaccaaggtaggtacattgcttgagctcagaagtttgagaccagcctgggcaacatggtgaaactccttctctatcaaaaatacaaatacttagccaggtatggtggtgcacatctgtgtttctgtcaccccagctacttaggaagctgaggtggaaggatcacttgaggtcaggagtttgagaccagcctggcaaacatggtgaaaccctgtctgtaccaaaaatataaaaattgggtcaggtgcaatggctgaagcctgtaatactagcactctggaaggccaaggtgggtggattacttgaggtcagcgttcaagaccatcctggccaacgtggtgaaacctcatctctactaaaaatacaaaaagtagccaggctttgtgggcatctgtaatcccagctacccaggaggctgaggttggaggatcacttgaacctgggatgtgaaggttgcagtgagccaagatcacaccattgcactccagcgtgagtgacagaataagactctaaaataaaataaaatacaaatacaaatacaaaaattagccatgtgtcgtggcacacacctgtaatctcagctacttgggaggttgaggcacaagaatcacttgaacccaggagacagaggttgcagtgagccaagatcatgacagtgcactcacagcctggaggacagagtgagactctgtttgaaaaaaaaaaaaaatctccctctccctccccctccctctccctctccctctccctctccctctccctctccctctccctctccctctccctctccctctccctctccctctccctctccctctccctctccctctccctctccctctccctctccctctccctctccctctccctctccctctccctctccctctccctctccctctccctctccctctccctcctctcgctctccctctccctctccctccacggtctccctctgatgccgagccaaggctggactatactgctgccatctcggctcactgcaacctccctgcctgattctcctgcctcagcctgccgagcgcctgcgattgcgggcgcgcgccgccacgcctgactggttttcatgttttttttggtggagacggggtttcgctgtgttggccgggctggtctccagctcctaaccgccagcctcggcctcccgaggtgccgggattgcagacggagtctcgttcactcagtgctcaatggtgcccaggctggagtgcagtggcgtgatctccgctcgctacaacctccacctcccagccgcctgccttggccccccaaagtgccgagattgcaggctctgcccagccgccaccccatctgggaagtgaggagcgtctctgcctggctgcccagtctggaaagtgaggagcgtctctgcccggccgccatcccatctaggaagcgaggagcgcctcttccccgccgccatcccatctaggaagtgaggagtgtctctgcccggccacccatcgtctgagatgtggggagcacctctgccccgccgccctgtctgggatgtgaggagcgcctctgctgggccgcaaccctgtctgggaggtgaggagcgtctctgcccggccgccccgtctgagaagtgaggaaaccctctgcctggcaaccgccccgtctgagaagtgaggagcccctccgtccggcagccaccccgtctgggaagtgaggagcccctctgcccggccagccgccccgtccgggaggtgaggggcgcctctgcccggccgcccctactgggaagtgaggacccctctgcccggccagccgccccgtccgggagggaggttggggggtcagccccccgcccggccagccgccctatccaggaggtgaggggcgcctctgcccggccgcccctactgggaagtgaggagcccctctgcccggccacgaccccgtctgggacgtgtgcccagcggctcattggggatgggccatgatgacaatggaggttttgtggaatagaaaggcgggaaaggtggggaaaaaattgagaggccgggtggttgccgggtctgtgtggatggaagtagacatgggagacttttcattttgttctgtactaagaaaaattcttctgccttgggatcctgttgatctgtgaccttatccccaaccctgtgctctctgaaacatgtgctgtgtccactcagggttaaatggattaagggcggtgcaagatgtgctttgttaaacagatgcttgaaggcaaaaaaaaaaaaaaaaaaaaaaaaaaagaaaaaaaaagaaaaggaaaaaaaaaaaaaaaaggaattatttgtcacttactgtctctctaagggcagccattgtaagacctcaaagaaactttagcctccacaatcttttctcttaacctgaacatttcctttctatggatcccaggtttttagacaaactcaaccaattgtcaaccagaaaatgtttaaatttacctatagcctggaggcctgcccaccacccctttgagttgtctcgcccttctggaccaaacaatgtctttctttaatgtatttgattgatgtctcctgtctccctaaaatgtataaaaccaagctgcgccccgaccaccttgggcatgtgttcctgggaccccctgaggctgtgtcacaggtcagggt

SEQ ID NO: 2566 - DNA, 6300 bp, Homo sapiens
  misc_feature (1)..(6300): DMR19:53511801
atatttgctgtgattctacagaaatgcatgactctcaggagacatccaaaagacagcaaatatctcacacgaaactgaatagtgaacttcatcctcaatgaaccacagagttcaccattctgagtatatcgttcaagttattttcctattttccttccgcaggttctagcatgtattaacaccgtgtgtctaaagtcatccctgctggtcatctggaggaatctgagaaggggcaggtctttcttctgactctcagagcagcaccctctgctggacagggctgggcacctcatctcaagcccaatctgatccaccaacagggtctgttatctccggtccggggaagaggtgggcctctctccatcctgggaggagcgctgagcttctccttcatccagggatgggccccagggacgcgccagtgggactgggagaagccaccctcagcagggaagacagagatgcctgcgtggccgaggcctggaaggtctgcaccatggtgcacagaggccccggagctgggtgaggccagaaagctgctctggggtcagcggggaatgtgcctgctgaatctgcaagcacctgagctacgtcttcacaaatggcctcagacctagagtgcagggagatcccctggcttttctgaagtggtggcaggtggtctcctgggtagcaggatctgggctgcttacttcccttacccagtgagggcccgcggggagctcttaagttgggcatcatgggtctgcgtgatgtggctgctgtgcccacatcagagggtttttgtttcttttccaaagtcaagctgcactaatctagaccagggatccccacccctgggctgcggaccggtccccatgggtggcctgttaggaactggaccgcacatcaggaggtgagcagtgggtgagggcgcatgaccacctgagctctgcctcctgtgagatcagcagcgccactgcatctcagaggagtgccaaccctactgtgaactgtgcatgcgaaggatctgggttgcatgctctttatgagatcaaactaatgcctgatgatctcaggtggaacagtttaatcctgaaaccatccccccgtctgtggaaaaactgccttccaccaaaccagtccctggtgccaaaaacgctgggaaccgctaatctagacagttctctgctaaggaagcacatggttgagaagcatcagaatcgttcccacggaccatgctccggagtctcagcaggctcctgcaggtgagccccactggcctctcctcttccttctggacctcctcagctttggtaatggaaagctgcatcctcttctgtccccagttcctctctgggtgtcaggatctctaaaaccctctcagccgctgagaaatctgtctgtctgtctcacagtgtgtttatccgtgcatcatgaaggaccctcatacggctgacgtgccttggctgatgcgaataacactgcagcaagcgtgggagtgcagatagctcttggaaatacccatttccttcagacgcatactcagaggtaggattgctggattgtttggtcattttgatttttaaaattaaaaagaattttaattctcatattgttttgagtaaaattaaattataacttgtaaggcaactccatgttttttagaatttttaaaaatataattgctctaccaattgactgtcccaacaacaacgtacaggggtattttttttcctccgcatcctcaccacttgttaccttttgtctttttaataatagcaatcctaagacatgtgaagtgatacctcactgtgattttgattggcattttccagatgattagtctattcaggccctttactttttttcgttgttgttgttgtttttgagatggattctcactctgttgcccaggctggagtgcgatggcacgatctcggctcactgcaacctccgccttccggggaggcgtgattagccgccacacctggctaatttttgtactttagtagagatgaggtttcaccatgttggccaggctggtctcaaactcctgacctcaggtgatccactatgcttggccttccaaagtgctgggattacaggtgtgagccaccacgcccagcccctttgctcatctttaatagggttattactattatcatatttgcttttgagttgtgggtgttccttatatattttggatataaactccttatcacgcatagggtatatatggtttaacatattttctcccattatcatgccccaatatcactaagttatatttcacagctccctcttgaacacctgaaaaaattcctaatatatttccatgtgtctgtatccaggttattgtggtttttgcctgaaaacacatttatatatgctgatattccccaataactaatatattttttctctgtttttttttgagacggagtcctgctctgttgcccaggctggagtgcagtggcacgatctcagctcactataacctctgcctcccaggttcaagtgattctcatgcctcagcctcccgagttgctgggattacagacacatgccaccacacccggcaaatttttttgtatttttagtagagacggggtttcaccatatcggtcaggctggtctcaaactcctgacctcaggtgatccacccgccttggcctcccgaagtactgggattacaggcgtgagccaccgcgcctagccctaactaatatattttaaataactttttgctcttggcacatggactaaaaccacatcactaggccttcaatgacgtccaatgtctgccatcttatttccactccagctccgccccaggcatagttgcttttctttttattgaagccttctccttttttttttttttttgagacagagtttcacactgtcgcccaggctggagtgcagtggcgcgatctcggctcgctgcaagctccgcctcccgggttcacgccatcctcctgcctcagcctcccgagtagctgggactacagaagcccgccaccacgcccggctaattttttgtatttttagtagagatggggtttcaccatgttagccaggatggtcttgatctcctgacctcctgattcacccgcttcggcctcccaaagtgctggattacaggcgggagccatggtgccccgccaaagccttctccttgccaagttaattaaagagaatgttttcttcatcaaattagaaattacatcctcagagaagctttccagtatttgtagttcttacaggccacatttattacaagtttatagactccaaacttcttcactgaacagttaataaaaaggacacaggcttattgtaaaataattcatttagtgcctgccattctgattacactagaaatttagttctcctgctccgcgttctgttatgtgactgttcaatgcattacttaaaactgcaagattgaatagagagatcagcttctaacattgatgaatgcaaaccacaagaaaccaagtctcctctgcaaaatgatgaaaacactcgcaaagtcactaaaatcaatcatttcagacttctgaaatttaccaaagccacagaacaaagtgaaaagtatctatcccacagaaagtaccaaacttcagtaagacagcagcatttgtgtcattttaacatgggcatttctgtcaccctccatccttcgttcattgtggagcactgactttgtttggttggttgtttgtttttgagacggagtttcgttcttgttgcccaggctggagtgcaatggcgcgatctcggctcattgcaacctccgcctgctgggttcaagcaattctcctgcctcagcctcctgagtagctgggattacaggcatgtgccaccacgcccggctaattttgtatttttagtagagacggggtttctctgtgttggtcaggctggtctcaaactcccgacctcaggtgatccgccttcctcggcctcccaaagtactgggattacaggcatgagccactgtgcctggctgccctgacttctttcgaagctccttttaaaccctttctgtctccatcttcatgttcaccacagtattatttgctatggccaagacacggaaacaacctaaatttccttcaaaggacaaatgggtaaagaaaatgtgatatatacacattaaaatattattcagccatgaaaacacagaaattctgccatttatgacaacaagaaaaaagctggtagatgttatgccaagagaaataaggaagacacagaaagagaaatattgcatgatattcatttcttcatttctggggaggcctcagaaacgaggtccttactaagatgtggcaggctagttttgtattttagactgctcattaaaatatgtatttattgggccgggcgtggtggctcacacccataacgccagcactttgggaggccgaggtgggcggatcgcctgaggtcaggagttcgagaccagcctggctaacatggtgaaacgctgtctctactaaaaatacaaaaattagctgggcatggggtgcgtgcctttaatcccagctactcaggaggctgaggcaggagaatcatttgaacccagcaggcagaggttgcagtgagccgagatgggccactgcactctggcctggacaacagaacgagactccatctcaaaaaaaaaaaaaaaaagtattaattgcctatggttttaaaaaatgcaagtagtttctgaaggataaactgaagactcttaaacagagcacttctgttttctgagtcaacctttcttgttcagagaatgaaaagatccaggatgcctcacctaacacccaggagggtccctgacttcctgattctaggccctaaacctatgtccaagagaaaagttacatctgtagtccagagctttttaaatatagttatccaggcccctaaacagcacaagaaaatggaagctaactccttacaacttgtgaaagagacaaagtagctgctgcttttttgttgcttattttggattaattaaagtgacatcttttttattctactttcttatttaaaaattaaaaaacaggttgtgttgacttacacacttctccataaaaatacaatatattgattcaatatgaaatgtctactttagtgccagataaattgagaatttgtataccaaattttaacaaatttgatgttctcaaaagaaacagcattattcactttgtttcagatgagactgggcttatgttcacaagtacacactcacagagatctaattccacaggcacacgtggtagagtaggctaagatcatcatggacagtaatgacttgcaatgccatttgacaaatcccccaacagagctctgtaaaaccactagaaaacgcgcacaacagcacaaccatcaaaatgaaaacacctgatgtacagagttgtatagtagttgtatagttagtagttgtatggagcacccttgacataagtaactccatcttagaaaaagactccatcttacatttcatggggcactttgccaacagggacaagatgttttgcttagtaaataaataataaggactgcatccaagcagataaggacataaacaagcacattcttccactatcagtcctccccacaggactctggccataaaagaagctgggcttcagcagctcaaaacggccatcttaactgccaaccatcctgctgtcatttgtgataagcacttgacatctgctgccaaagtttctacccacatcaaagattcttctttgcaagatcaacagacaactcagcccagaccaggagactgtttatgtcttcattactctccccacgcaggttcaagtctgctgagatttggtttatctctgatttattagggagaattggctcacacgatcacaaggcaaagtcccatgataacccatctgcaagctgaggaagaaagaagccagtagtggctcagtccaagtccagaagcctcagaagcaaggaagccaacagtgcagccttcagcctgtggccaaaggcccgagagcccccagcaaaccaccagtggtccagagataaccaggtccacacacgtttgtatctttccacagtgtcaggctttgattgatgctatttcaatcacaaaagccatgagccgcctggagttcccaaagaggcttgtgatggttaatattaagtgtcaacttgattggattgaaggaagcctaggcagctggtaaaggattgtttctgggtgtatctgtgagggtgttgccagaggagactgatgtttgagtcagtggatggagagaggaagacccaccctcgatgtag

SEQ ID NO: 2567 - DNA, 6000 bp, Homo sapiens
  misc_feature (1)..(6000): DMR19:54772001
gggtaaagggggattgaatacagggaaatgggtgctgtggtgggaagaataattgtccccagtgatgactacattctaatccctggagtctgtgactatttatgatataggggaagggactgaaggagaagatggagctcaggttgttgatgagttgaccttgagatggggagacagcctggactgtcctgatgggctcagtgtagtcacaggggtccacatgaaaggaggaggaagaggggagtggggattacagcagcataatgggagtctccatcagctttgaaggtggaggaagtccaggagccatgaatgcaggtggcctatagaggctggaaaagtcaaggaactgattctcctgagtctccagagggaacgaagccctgcaggtgccttgattttacccacgacaaacagggtccgatttctgtctccagaattggaaggggttagtgtgctctctcctggtgccatgcttctgataattttctacagcagcaacaggaaaccaacactggaacccaggtcaaggacaagttaagaaacaacacaaggatagccaggcatggtggcaggtgcatgtaatcctagcgacttgggaggctgagggcaggagaatcacttgaacccaggagacagaggttgcagtgagcctagaccacaccacttcactccagcctgggcaaaggagtgagactctgtcgccaaaattaattaattaattaaagaaaccaaacaaggagaaggttggctacactgagatcagcaaggctcagatgatgatgccaccaccaggctccatccacatagggaggggttgatactcctccaaccagcaccaggagccagcctatggaagctggcactggcatggcaagagtggctcccagtccctaccaggaacagggtgtgtggccactggtgcctgccttactgatcagttcatacctcctgccaaggattccaattcgtccaaaagagattgaaccaggctgctaagagcctggatgtgcagcctatcctggttcctcttccacccccacatagacagcaggaaagacattagttcgaaatagatacaacagcccaagagatgaggctgagcccagcggcaagggaatcagaggctactagagacagagggacagagaagagtgagggagacagatggaaggacctgcaccaggagttatgggcacagaaaagaacatgaagacacagagaggaaggagagagataagacaccaggaaggggaagcctgactcaatccaggtgccatggatgggatgataaagagagacaccttctaaactcacaacctctcttcctaggagtccacagaaaaccttccctcctggcccacccaggtcgcctggtgaaatcagaagagacagtcatcctgcagtgttggtcagatgtcatgtttgaacacttccttctgcacagagaggggatgtttaacgacactttgcgcctcattggagaacaccatgatggggtctccaaggccaacttctccatcagtcgcatgacgcaagacctggcagggacctacagatgctacggttctgttactcactccccctatcaggtgtcagctcccagtgaccctctggacatcgtgatcataggtgagagtgtccagactttcttctcattgtcattgggatgcagagtgaatgatccaggaattggagacccaggtggctgtaaggaagatgagcttggtattcttatggagagagactgacttggtgaggtctgtgccaacagagacagagaaacaggagacacaagtagagaccaggtgtcataacagagaacagacacaggggccataccgggagttagaaaagacagaaagagttaaaggagacacacagacagacatgtcccagagagaggtgtccctccatgctgactttgctcagagacctggcacaggttagaagtttcatttctgttttacctccacaaagtgttctctaccaggagaacccaaggacacccatatttctgacctgagttgggccctgtggcctcaggccttgtggcacctacagatgccatgtttattctgacacctctgccttccatgtaatggagagtaatcgtcccaggatatcatggccccacaacaccaacccctgtatgctgtgtgaacttgtagtctccagactggattctgaggctcatattccaaataagcccacttatgagaggatcagtgagaggcacagagagaaatcagggacaccaaaaagcaaagacataaacacacagagaatgagccagaggaaggagattgagagactcacagacacataaagagagagaaaagagggcagaggagtggtgagaatgatggaagggagcagagaaaagcactaaaattagactcctgagggagaggcacaaggacattgaaagatggagatgtggggatgaattgcagagattccaaagagaactagagagaccgagaggcagagcaagacagatgatagatggatagatatagatagatgataaataggtagatgatagataataggttatagatacatagatgatgattgattgattcattaatagatgagacatagagatgatgatgatgaagacagatagatagataatacatagagatacagaggcagacatagagaaatcatagagagagagagatgatacatagatatagataatagatgattgatggatagatagacaattgatggataaatagatgatatatagatatagatgacaggtagagaatttgtagataggcaccgaatagataaatagatagatcgatagataatagatagaaatatgcagaaagttatgaacaggacacaaagtgagaaactcagaattaaaaaaagtaacatcaagtcaaccaatccaaggagagtcagagagaataaaacaatccaaaaagagaaaacatatctagaggtggggaagtgaggtcagagacctagagagacagagaaggtggaaggaggaaatagacatgaagagcgatggggtagagggtgagagagagagagagagagcattaggtcatagaacaggggagtgagttctcagctcaggtgaagggagctgtgacaaagaagatcctccctgaggaaactgcctcttctccttccaggtctatatgagaaaccttctctctcagcccagctgggccccacggttctggcaggagagaatgtgaccttgtcctgcagctcccggagctcctatgacatgtaccatctatccagggaaggggaggcccatgaacgtaggctccctgcagggcccaaggtcaacggaacattccaggctgactttcctctgggccctgccacccacggagggacctacagatgcttcggctctttccatgactctccatacgagtggtcaaagtcaagtgacccactgcttgtttctgtcacaggtgaggaaagcccatggctgtcccatgtcctatgatcctagagccttagctgaggagcttcctgctgaggatggagagaagcatggacagatgcagagagaagacgcagcctcggtgtgagggagggatcagggcacaggatggccgacagggcacctccaaaccctcctacatggcctgcatggaggcccacggccagggctccaggcacccaggcagatggagaaagcggtcaggagagacccagaggagggagactgggctcagtttggggagatcagaggttccctcagcccctcaaccttacccatttcccagaagcccatcctggcctctcacccacacagagatgtcatcaccagcaacccctacaccctttacttttctttgaagaaatatttattgaggataaatatacctatatagcttaccacttttaacatttttttttgaggtggagtctagctctgtcccctatgatggagtgcagtggcacaatctcagctcactgcaacctccgcctcctgggttcaagcgattctcctgcctcagccacctgagtagctagtgctacaggcacgcaccaccacgccaggctactttttgtatttttagtagagaggtggtttcaccatgttggtcgagctggtctcgaactcctgaccacgtgatccacccgcatcagcctcccaaagtgctgggattacaggcatgggccaccaggcccagccacatttaccatttttaagtgtaaagtctagtggtcataaatacatttttatatatatatatatatacattttttttaccctccacccttttcttcctgtcctccagtagccaccattctactctctaccttcatgagatccaccttttagctcctgtatatgggtgagaaatgggaatctttttaatgacctccagttccatccatgtggctgcaaatgacaggatgttattctttctatggatgagtagtctccactgtgcgtatgtactacattctctctatccattcacccactgatgggcaggtaggttgactcctcatcttggctactgtgaacagtgctgcaccaatcatacgagtgcagatatcacttcgatatgttgatttactttcctttggatataaacccagtagtgaaattgctggatactatgaaagttctcttttttttttttttttcttttttgagaaagagtttccctccttagcccaagctggagtcaaagtggtgcaaccttggctcattgcaacctccgcctcctgggttcaaatgattttcctgcctcagcctccctagtagctgggattacaggtgcacaccaccatgcctggctactttttggtttttttagtatagatgcggtttccccatgttggctgggctgctctcaaactcatgacctcaactgaggtgcccgcctcagtctcccaaagtgccgggattacaggcatgatccacctcacccaacctctttttagttctttaaaggacttccatacttttctccgtaatggctgtactaatttacactcctcccaacagggtaccagggttctcctttctctaccaccttgccagcatttcttttgcctgtcttgcagctaaaagccattttattttatttcattttattttgagatggagttttgctcttctcacccaggctggagtgcagtggcgctatctcggctcaccacaacctccacctcccaggttcaagcgattctcctgcctcagcctcccgagtagctggaattacaggcacacgccaccacgccctactaatttttgtatttttagtagagacagcgtttctctatgtgggtcagactggtctcaaactcccaaccttatgagattcacccacctcaggttctcaaagttctaggatgacacaagtgagccacctcacccggcctaaaagccattttaatggggtgagatgaaaactcactttgattttaatttgcgtttctctgatgatgagtgatactgagcactttttcgtatgtggggaaatttcatgtcttttgctcctttttcaattaaatcatttgttttattgagttgtttgagcttcttatatttctagttattaatcccatctcagatgcatagtttgcacatatttgctcccaatctgtgggttgtctcttcactttgttggtttatttttagcagtgctgaagttgcttagtttgaggtaatcccaatggtctatttttgcttcgattacttgtgttttgaaggtttaaaacaaaatgtcttccttcagacaaacgtcctggagcatttccccaatattttgttctacgtgtttcataggttcaggccttagactcacatctttaatccattttcatttgatttttgtgtatggtgacaggtagagttgcagtttcattcctctgcatgtagatgtccaggtttccctgcactgtttattgaaaagactgtcctttcctgattgtgagttcttggcatctttgtcaaagtccattggatgggctgggcttggtggctaacac

SEQ ID NO: 2568 - DNA, 1200 bp, Homo sapiens
  misc_feature (1)..(1200): DMR19:54818001
atcaattggctgatattccattcacataggacttgccctccatgccgtgtctactttgtgttgttttatatgagtaattttgcagtattaaaatctagtaagagttgcttctccagcaacttgctcaaagttctcagctgacacttgttgtagggagacgccaagtctatgcaggatgggtccttcctgtagccctgggcacccaggtgtggtaggagccttagaaagtggaaatggggagaatcttctgggcactgggagtgaggggcggctccacatcctcctctctaaggcagtgcctccttctcccccaggtggtcaggacaaacccttcctgtctgcctggcccagcgctgtggtgcctcgaggaggacacgtgactcttcggtgtcactatcgtcataggtttaacaatttcatgctatacaaagaagacagaatccacattcccatcttccatggcagaatattccaggagagcttcaacatgagccctgtgaccacagcacatgcagggaactacacatgtcggggttcacacccacactcccccactgggtggtcggcacccagcaaccccgtggtgatcatggtcacaggtcagaggctttccgtctgggcttctcactgtcccacctcctgaatcccagagcttctggtgggggtgtccgtcagggtcccatcacccaggccctgactgtatttggggtcaagggagattgaatacaggggaaatgggtgctgtggtgggaagaatcactgtccccaatgatggctacattgtaatccctggagcctgtgactatttatgttacagggcaggggactgaaggggaaggtggagctcaggttgttgatgagttgaccttgagatggggagacagcctggactgtcccactgggctcagtgtaatcacaagggtccacatgagaggtggaggaagaggggagtggggattagagcagtgtagtgggagggagacgctatcagccactgcgggctttgaaggtggaggaagaccactagtcacagaatgcaggtggcctctaagggctggagaagtcaagagaactgattcgctgattctccagagggaacgcagccctgtagacaccttgatttcagcacagggagaactggatccaatttctgtctccagaagtggaaggggtcagtgtgttctctcccgctgccatgtt

SEQ ID NO: 2569 - DNA, 400 bp, Homo sapiens
  misc_feature (1)..(400): DMR19:57178901
aagagtgggaacacttataaatatttggaaattaaaatagtgcctttttaatttgcatttttagattttaaaaataattatagagttgcagaaattataaaaaatagtgcagagttctgtgtattcttcatccagcttattcaaatgatgacatatttatatagtacaatgttaaaaccaggaaattgacattgctacaatctgtaggccttatttagagttaaccggttctctacatctctcgtttgtgtgtatatgcgtacttctatgcaattttaattttttctttttctttttttttcttttttctttttcttttttttctgagacagagtctcgctctgtcccccaggctggagtgcagtggtgtgatctcggttcactgcaagctccgacttcc

SEQ ID NO: 2570 - DNA, 2400 bp, Homo sapiens
  misc_feature (1)..(2400): DMR19:57579101
accaagagcgagacagggacttgctgctccttaaaggggccgctggccgatttccgcagtcccatacccactgaagggagtgtctgggttaagataagaggttgtagagaccaaggttcttattaagcagatgaagctttcacgcagcaggcttcagagggaatagattgtaaatgtttcctatcagactttgaaaggtgccagactcttaattctttcctggaccatgaaaataaaaaaaccctggagaggaaaggggattctcagcaaaatgcagattccacaagacacacctttgcagggcctcttcaaaatatgtcaaataaataaagtttagagtaaaatacttcaattcctttcagggcctgctatctgtcatgtaatgctatactacaatcaggctggaattcactgtcttattgctacaagaagtcttaaaatctctgttttaatgttaatgctggtcagttgtgcctgaattccaaggggaggagggcaagtctgaccctcacttcccatcacgtcctgaactagtttttcagattaactttggaatgcccttggccaagaggaaggatgcattcagatggttggggggctgggaattttatttttggtttacacttctcatgcctcttggaatctctgaaccacatacaacggccatttgttgagtaaaagcttccaatgcaggaaactgtctctttcagcctcatgctatacaccattaaaacagtaattactggcaataagactgggctttcttaaacatacaggatctcacagaccataagcctatgatccttcataccagctgcccataatacttttggttttggaagcagcaccccataacctcagcatggctaccaaggcctccttaagacagggtagaatgaataagatctagtatttgatagcacagtagagagactacagtcaacagtaatttattgtacattaaaaacaactaaaagagtattataactagaatgtttgtaacacaaagaaatgataaatgcttgtgtaccctgatatgattattacacattgtatgcctgtatcacaatatctcacgtatcccataaatatacatacatactatgtactcataaaactaaaaattttaaaagacagataaatggcaagcaggtagatgaaaacatgcttaacatcattgatcactataaaaatgcaaatcaaaactacaatgagatatcatctcactctagttaaaatgacttttatgcaaaagacagggaataatgaatgctggccaggacagagaggaaagggaaacttcatacgctgttggtgggagtgtaaattagtaaagccactatggggaacagtttggaggttccccacagaagtaaaaatagaattaccatatgatacagtttacaccacccagaaaagaaatcagtatatctaatagagatctgcactcccatgtttattgcatcactattcacaacagccaagatttggaagctacctaactgtccatagataaatggataaagaaaatgtgatgcatatacacaatggagtagtatttagccataaaaaaagaatgagatcccatcaattgcaagaagacgggtgaaattggaggaaattatgttaagtaaaataagccaggcacagaaagacaaacttcacatgttctcacttatttgtgggagctaaaaatttaaacaattgaactcccggagattaagcttagaaggatggctaccagaggctgagaaggatagcagaaatggaagggaaagtggggatagttaatgggtgcaaaaatatagtcagatagaaggaataagacatagtatttgatagcacaacaaggtgactacagtcaacaacaatctattgtagaattaaacataactcaccgggcatggtggctcacgcctgtaatcccagcactttgggaggccgaggcgggcagatcacaaggtcaggagatcgagaccatcctgactaacacggtgaaaccccatctctaaaatcaaatctctataataaatctctaaaaatacaaaaaattagccgggcgtggtggtggtcacctgtagtcccagctactaaggaggctgaggcaggagaatggcgttaacccgggaggcgttgcttgcagagagctgagatcgcgccactgcactccagcctgggcaacagagcaagacttcgtctcaaaaaaaaaaaaaaaaaaaaagaattaaacgtgactaagagtataactggaatgcttataacacaaagaaatgataaatgcttgaggtgatgaataccatttatcccaatgtgattattacacactgtgtgcctgtatcaaactacaccatataactcataaatatatacacctactatgtacccctaaagactaaagat

SEQ ID NO: 2571 - DNA, 400 bp, Homo sapiens
  misc_feature (1)..(400): DMR20:131201
tgcgatcaactggaagaaagggtatcagcaatggaagatgaaatgaatgaaatgaagcgagaagggaagtttagagaaaaaagaataaaaagaaatgagcaaagcctccaagaaatatgggactatgtgaaaagaccaaatctacgtctgattggtgtacctgaaagtgatgcggagaatggaaccaagttggaaaacactctacaggatattatccaggagaacttccccaatctagcaaggcaggccaacgttcagattcaggaaatacagagaacgccacaaagatactcctcgagaagagcaactcaaagacacataattgtcagattcaccaaagttgaaatgaaggaaaaaatgttaagggcagccagagagaaaggtcgggttaccctcaaag

SEQ ID NO: 2572 - DNA, 3100 bp, Homo sapiens
  misc_feature (1)..(3100): DMR20:574601
gggtcccaggggcctgctgggtggagggcccggtctggctgggctgcttttctcgcccctttgccggcccgctggcttcacgcacagattacaacttcccctcttcggccgtcttacgcaggccacctccggctcgccattgtctcattgtttgctgagggaagctccaggaggaaatcaacctgctgctcaccccaagcagggagtttcacccccagcccccacccagggaatgcctggggggagggcaggaggggtgggggcaggtagcaggcaatgcaacaggcagccttgaagggagtgagctccctggccgggaagtatgcaagcagaagctacattcacagcacctatttactaggtcctctcccaggctgcacgtcaggcagctggagacacagatgctagaaaagggtcttgtccttaaagaccctgtagcctagaagagatgctgggcagggcctcaaagccaaatgccttaggggccagacaggtgacagaaatctgtaggcctgcgagcaatgctgagtggtcgggacgttaaatgaaaactatggtgcgaaggaaggcttttagattccaattttattttaacatgttgctaatcaaacaaatgagtcctccagcctgatgtagactgcggaaccccagcctagccctttagaaaggaattcttgttctggggtgaaattggatcaatagttattggtgtctgcccctatgcctttagctatagctgtgatgggcagttcccagcacactgacagcatcccttttcaaacacccagcagtcatttggcttctctgaagacttgggaactctctcagggacctgggaggagttgatgccactaggggcacccctcagtcaatggggaatgggagttagtgggtaaatgccccatcctcttatccattggaagttcctggtcactcaaaggtctgcagtgagttgggggcactggttgcccatactggaaactggctcaataactcactttttatccgtttcccctcttcgctgtcactctcccagatccctctggcttcctgggctaccggctcccaaattcttgtctcaggctctgcttttaggggaacccaaactaaaacagtctctaatattctttccaaatagcttatgattgtacacttaggtgattctaatatccaatgactttaactctgtgattataagttttcataagtaaacccaactgtgattccagaatgatgtcattctaatatggccgagatacacctatcagaactggaatgctccattttgtacaactgaattttgcttctcttgagctcctattttttttttccgatgccagaaaatgcaaacttcaaaaaaatctagacaaaaaccaattatttcagatttgaactcagttgggtgaatcaagctttccctggcatcccttttttcccggattcatttaagtcctggaagggtagaggcatcttggcattggttgagggaagaaggggtctgtgactggtgtttctcaagctataccaacccatctggctctccagcatgcttctgcccccttggcattcactggagatgacccactcatgttgatgctttgatctctagggtcaaagaagcatagctttctcctcctggaccatacactgtaagagtcacgtccactccattcagtcatctgaaaagatgtgttcactttttacacctcacaaggccctgtatacaaactcgtcattcaatcaaatgtacttgctgagtatccggcatgtgttggcattgagccaggcactgaggatacaaagatgaaaagacaggtccctttcctcaagtcatttgcaagccaaataatgtataaatattttcaacttacatattgtgatgtccattatgaaggaaccaaatagggtaggcagagaaagcctctttgaagagctgtcattggagccaaagtctaaagtcaggggaagccacaaaaaggtttagcaagaaagacatgtctgattatatctgtaactgtaaaacattttctttttctctttctttcttttattattattttttggagacagggtctcactttgtcacacaggccagagggcactggtgcgattttggttcactgcagcctcaacctacggggctcaagcgatctccttcctcagccccccaagtagctgggattctaggcacatgccaccatgcccagttaatttttttgtattttttgtagagatagggtttcaccatgttgcccaggctggtctcgaactcctgagctcaagtgatatgcccaccttggcctgccaaagcattaggattagaggtgtgagccatcacgtttggccggtaactgtaaaactttttgtaatactgaaggcatctcctgcattttttcatacattttacttttcccctatttattggtggcctccatcaccttagagattcacgtctcaaaggacaagagtcatggaaatttagtcaaagccctgagtaatttgagagtgtacaatttatgccataaataatagattgagaagaatagatgagtcaaattggttttcctctttaggaaacgagataaagattatcgggaggtggggagaagggaagtgtagcagagatgtccagctgtcatgcaattacccgacttccccttcttctatagctgcagatggccatgtatctacactgcatttcgctgtctcccttgcagtttaggcgtggccacgtgaccaggctctggcaaaggatatgtgaaccgaatggtgtgtgcaacttctgggtcatgcattgaaagaaaaaaaggggcatcctcttcccacacctcttcttcccttcctgccagctagaatttggcatggtggcaggagcagtagcagccgtcttagaccacaagactgaagccacacgttgaggatgtcagaacaacaaaatggaaggatcccaggtatctgacgtcatgggactcatagcggcctagactgcttgccccctactggttagtgagagagaaatcaatagctgagttagcatcccaagtaatacagagggtcagaaatataggaaattagcctgttgctgtggctcacgcctcta

SEQ ID NO: 2573 - DNA, 1300 bp, Homo sapiens
  misc_feature (1)..(1300): DMR20:1448001
gattttgtcaagctttacaattacgatggttttagaaaaataatatttatattggaaatgctttctcaaacttctccttgagtttcactcctcacttatgagctgatgaccctcagcaagttactgagcatcttggcacctcaatttccttttctataaagtggagatactctccttaccacagctccacgccttttggggaagcagtccctactgtccctattatcaaggagagttggtgtgatgccagagaaatggcacaagctttggagctgagccaccaccatttggcctctgctctgcctctaaacagacagtgtggccttaagcaagtcacaacttcccagggcttcagtgtctttgtgtgtaaaatgaggagctgttctgttgtgaggatgagacgagataatgtgcacgcaaggcctggtatttaggaaatcctccacacaaggaagcagctgctgtttgggtttgcttcccagcacgtcccattgcagactgctggtgggtcatcactggaagagatgaggaaagcctgatgcctggacttggctgtgtagcttctgactggctgtttctcttacacactccctaaaaattaggtgaggcagggtggcctgataaacatggtgactatttatgaggcacccattcctaagccaggccctgtgctgagtacttcacatgtattaacttacttaacccacaggcttaacccccagcctatgaggtagggattcattacagatgaagaaactgaggcacagcagggtgaagcaacttgcccaaaatcccagtgttggttcacggtagaggcagtatacaatccgagctatttggctctccatcctgtgctcttcacactgtcccactctcctgttgggccttacactcagacaggtataggcctggatttcaagacccagtttcctcatcaataaaacagagttaaaacttcccagatacttgagaaaatagctaaaaacatgcactgtacccaacacatactaaaagtacaaacaaatgtctatgtggctatgcaagaatatccaggatgctatgcaggttggcaggtaaaggcagagactggagggacccagctctgcactggccagcaatatggatctcaccaagtctcaggatccttctttgtagaatggggattaaaacaggattaaagaagataaaataaatgaaatacttagcatagcgcttagctaacaacataaaacactcgactaactaattatatcattcttcaaggtcctgccccacttatatttgcctcaattctggacca

SEQ ID NO: 2574 - DNA, 800 bp, Homo sapiens
  misc_feature (1)..(800): DMR20:2311001
tatcaaatagtggatagcgtctttatgggtaaccacgctgagagagaagagtatgttcaggaagatgccggcatcatctttgtgggaagcacaaaccgaattggcatgattggctggaactttggacaggtaaaagggtcataaggaagctaagggtaatgtccctgttacccaagaagctcagcagcttgccccacagatcaatgggaagtcccacatctgtccatctgcctgcccttctatttgttcatgtattcagaagactttcattggccacctattatgtgtcagaccctgggatccacactaaggataaaggagatgaataagacagatccatctttgagggggttgcaatctagtgggcaagacagaacacacacataactcaattgatgcaatgaagtagtattggtgccaggatgcacaaataaatataaggcccccaagagacactggggacagtaatgtagcttctgtttttcattccatgtaacaatgcgatgacacttccttagtgtgcccactcagcctttccaagccacacccttttgttcctttattacagcaatccccatttgagtctacagagttctcagatttggtcagtttagaaaactttcaaggatgccctccaccttttagtttatccaccagacaaaggcattagaataaagcacctcgggcggggtgccttggatatcagaaagatgtgtgcttggaccatctacagaccctgtctgtagtcaactggagcaagttgggaggaagaaaaaagagaaggataggacatagagtgc

SEQ ID NO: 2575 - DNA, 500 bp, Homo sapiens
  misc_feature (1)..(500): DMR20:2588101
tttaaaagccaagagttttctctggctggttgcagaagaagtcacagatattcaaaacatgggaaggattgaacacaccactgctggcttaaagatggagggaaccatgtaatggggaatgtgggagcccttgagaggctgagtgtggccgccatctgccaccccgcaaggaaacagggacctcagtcctacaagcacaaggaaatgaattctgccaacaataagtgagcttggaagaggactccagaccccagatgagacccttagcccctgctgactctttgatttcagtctggtgagaccctgagcagagaatccagccacaccatgctagactgctgacctacagaactgtgagctaataaatggtgttgctttaggccatctttgtggtaatttgttacacagaaatagaaatccaaagcagtagatatccagctttggatctgtagcacttactaaatcttaaactgtcttttgtcacattgggaaaattctct

SEQ ID NO: 2576 - DNA, 1600 bp, Homo sapiens
  misc_feature (1)..(1600): DMR20:2869501
ccttctgccctgagcagtttgtacagcaggcctatgcctacatgggtgggcagggccaagtttcgtccaatgtatgacgctaggattggggctaggaactaggactgtgtagctggaggcaaagaatctgggaacatttcttcttgtatcagtggtagccagtgcagggagaatcagggcaaaggctgggcgcagtggctcatgcctgtaattccagcactttgggaggcttaggtgggtggatcacctggggtcaggagtttgagaccagcctggccaacatggtgaaaccctgtctctagtaaaaatacaaaaaaattagctgggggtggtggcgggtcctgtaatcccagctacttgggaggctgaggcaggagaatcgcttgattgcttgaacccaggaggtggaggttgcagtgagctgaaatggcgccattgcactccagcctgggcaatgagtgaaactctgtcttaaaaatatatatatatatatcgagcaaaggctcctacaactcaccttctcagggtaaggggctgtatgtccagtctcttagatacaaagttccagtgaaagactcttggggttggccaggcgcagtggttcacccctgtaatcccagcattttgggaggctgaggcaggcagatcgcctgaggtcaggagttcaagaccagcctggccaacatggtgaaaccctgtctctactaaaaatacaaaattagccaggcgtggtggcgcatgcctgtaatcccagctactcgggaggctgaggcaggagaatcgcttgaacccgggaggcagaggttgcagtgagccgagatcgtgccattgcactcaagcctgggcaacaagagcaaaaactccgtctcaaaaaaaagaaaaaaaaaactcgggtttgaacagtgtggcctgcaaagggacttggctctcatttacttcacctttctatcttattgccttgctttattttcatttcagcatttaggaaattttcttgttcttttgtttattgtctgtgttcctatccagaatgtaagctcctgagagcagaggcctcttctgtcctcttctgtcttattccctgctgtgtccagcacatggtctgcactcaataagtatttgttgcgagaatgactcattgttccatttactagaaggggaaaggaggccccgagaggggaaatgacttgcctaaagaaacaggagtcctttccccccatcctccagctctcctgatcctctcctttgctcataaaccctgtgactgttggggcacctgtggggtggctgcgaaatgcctacctgtaggtatgtgctcctgtgggttgggactaatgcaggactaggagtaggagggctctgcagtcccccatttgggtaggcttgggcacaggaaactgcctcctttcccttcctcagttctcttctcttccaggataaccctttactctgtgatgatgatgggcgagggagctcaggacactctgggagccaagtaggatggagggctgggcaggtctctacaggcaggcagctgaggagggggctctgtcttcttccaatggaaacagcatctgtgtggttgctgagctgaaccctc

SEQ ID NO: 2577 - DNA, 1200 bp, Homo sapiens
  misc_feature (1)..(1200): DMR20:2936401
agtatgcctgcctgggcctcccaaagtgttggtattataggcatgagccaccatgcctggcctaggtcttttttttttgagacagggtctcacttttgtcacccaagctggagtgccgtggtgcaatcatggctcactgcagcctcaacctcctaggctcaatcagccctccacctcagcctcctgagtagctgggattacagatgcatgccatcatgcctggctaatttttgttttgtttggggtttttttggtagagacagggttttgccatgttgcccaggctggtctcgaagtcttgggctgaagtgatccacctaccttggtctcccaaagtgctgggattacaagcgtaaaccattacacgtggtctagttgggttcttttttaaaagaatcagttctactaatttcttttcgttggtatgtataaaccatttatatttaatataattattgatactttggatttaaatttgccatttttgtttcattcattatttttgttcttctgtttcccctttcctgttttacagtgggttccttgaacattttttaatatttcattttgagtgtatctctttataaagttttttgtgtgattgctctaggaatatatatgtagataacttattacagtctattaatatcaactttttaccaccttaagtagaatgtagttagttttagtagaaggaatcttttagttccttctacctttcttcttctttttttttttttttgagacggagtcttgctctgtcatcaggttggagtgcagtggcgtgatctcagctcattgcaatctccacctcccgggttcaagccattctcctgcctcagcccctccgagtagctgggattacaggtgcatgccaccacacccagctaatttttgtatttttagtagagatgaggtttcaccatgttggccaggatggtctcgatttcctgacctcgtgatctgccggcctcagcctcccaaagtgctgggattacaggcatgagccattgtgcctggcacaccttccttctttatggtacagttgtcttaaatattacctctacatacaaggagaaccacttcagggactgctataatttttactttcaaccatcaaacataatctttaaaactcaagagaagaattgcttaattagtgtatgtatgtgtgtctgtatatgaataaacatatatata

SEQ ID NO: 2578 - DNA, 900 bp, Homo sapiens
  misc_feature (1)..(900): DMR20:3648501
tgaatttggagagatactcaaaagagctaaaactgcagcattttacctttaaatgcagtgcctagagagagagtattgtctcttccccaacactaaccccactcccatgaagaattgcctggaaagatgttttcaaggaatttgaaccataaaacactatctgatgcacagaacacctctactttgagactcacctctcataaagcttctttttcacattactgttaaagaccagacgttctagaaaagacccctcctctcatgagctcccccatccctgctacagaacacagcacccatggcgcctgcagtggactggccccttaattcccacaggcccccccagcaaggccaaagggaggcccctgggtattgtcctcctacaaggaagatcctctttgtttgttcaaaggaccagttttcctaggccaaagaagtctcttccccatgttagtcctatgccttgaaatatcatgcaccatgacccacagccatctggttatgtcttatttttttcctaaaagataatgtttatttttaaaaaggaaggaaggagcaagtgaagtttcattctgctccagcggtggggaagccgctgaatccacctgcttctcctttgcaaccgacagcaaacagctttctccggcctcagggcagaaaaagggaatggcagggagtaagaggcgctgggctcggagcctgtttccaagaaggaattggttgtcatctggcagtgttgcgcgtcacaagagagcctgtatataaattaaaatagtcaagacaacactgaccttgcacttgtacataactatacagtagtgtccagaatgttcagacattcggagtgtacataaaacagaaaaaatcttcatgtatttttattaaatataacaatgtctg

SEQ ID NO: 2579 - DNA, 700 bp, Homo sapiens
  misc_feature (1)..(700): DMR20:4346701
ttttgcctcacgtattttgatgctctttttttttttttgacagagtctcactctgtcgcccaggctggagtacagtggcatgatctcggctcactgcaagctccgcctcccaggttcacaccattctcctgcctcagcctccctggtagctgggactacaggcacctgccaccacgtccggctagttttttgtatttttagtagagatcgggtttcaccacgttagccaggatggtctcgatcttctgaacttgtgacctgcctgcctcagcctcccaaagtgctgggattacgggtgtgagccaccgcgcctggcctttgatgcccttttgttaggtgcagtgacgttaaggattgttataatttcttagagagttgactcctttatcattttgtaatgtctcttcttcatctctgataactttccttgctctggagtctgctctgtctgaaattaatttagctactcccaccttcttttgattgatgttagcatggtgtatgtttttccatccctttagttttaatctatatgtgtctttatacttaaaaagagtttcttgtacataacttatagttgagtcttgtttttctcactctgataatctctgtcttttaattgatatattcagaccattaatgtttgatgtgattattgatatagttgggttaatatctaccatatttgttactgttttcc

SEQ ID NO: 2580 - DNA, 200 bp, Homo sapiens
  misc_feature (1)..(200): DMR20:5598901
caaccagatatgctgccccctttagcagagatgaaagagcctcactagatataggtttgggcccaggtacctaccactcactaacacctgccaattaactcgactcacctttctagaaccaaagccagagaaaagggggaaggcatacggatgaagttttcttcatctgttcaactactcattgagccagtaacaagaac

SEQ ID NO: 2581 - DNA, 200 bp, Homo sapiens
  misc_feature (1)..(200): DMR20:6288301
cttgatttcaaaacatattacaaagctacaacaataaaaacagtatgacatggatgtaaagacaggcacatagaccaagggaacagaatagaaagcccagagaataaacccatgtatatacggtcaaatcatcttcaatgagggtgccaagactgcacaatgggggaaaggataatctgtgtgacaaatggtgctgggaa

SEQ ID NO: 2582 - DNA, 1200 bp, Homo sapiens
  misc_feature (1)..(1200): DMR20:6646201
ttaagtcagtcctttgctaattgaatgtttaaaatctggggcctactgggtataacatttattgagacaaagtaattaacattttctttcttgatgcatttctttcaatattatgcttaaaacctcaacacatagtagaatgcttagcatataataggagttcataatagctattaaaaacaaagtattaagtaagagaaatgtgttctagaactggcagtcttcttgaaccaagaaaggctcaagggaaacaaaaggaatctcaactatgtacctcagatttctgagtccagaagttcattttcagtggcagtacaaatgtgggacatttttggttaaaatacgtattttactgtataggtccactgtgattttaaatgcccttatgttgcttaacagacattacttatatctactttacaatgtgcactgggcttcacagcattaaaggtggaattgttttaaaaagtagccttttagtaagtcagatacattatcgatatgcttccaaatacttggtctaggaggaaaataaggggaaaacatagtgaggatatattgaaaaatattttttttctcagaagaaaggagatacagtttacataaatttgagaattcggcattgcttaattctccctaatgtctacgagaacttctgctttaaaaccagccccaagaacacattggtcagccagctcttgtgctgaatcccagaatattaagaaccaatttaaatgcttattaaaattattattcttgtcttacttttatatgtctatttttctctattcatagatagtcatctctatctcagttacctatctaaataaacatatacatgaaaccaagcataataatgccatacatagaaatctaaaacaaagagaaattttaaaacgattatttatatgagaaagagttcactcggatattgttgcattctttcgtggttgctaagtgcgtttattccagaagggtctcctatgcagcaggccctgaggtaggagtaataagaataataaatacagttgaggcagagatgtcggggtgatgctcagaggaagccgatgttgaaccaggtacattatagaaataaaatatctaaaaaggaggagagaaaaacatttttagtttcagcaaaattgatgtaattgtgaaagaacacattttccaagaacactgaggactgtgggtgacttg

SEQ ID NO: 2583 - DNA, 200 bp, Homo sapiens
  misc_feature (1)..(200): DMR20:7279101
ctcttggcaactgggctttgtccctggaacttaaagccatctctgctgagctgagtatcaacaccttcacgagttcttcaagtctgatctaacctctgcaattcactgcctattcttatcaccctgatttttatcatcacctcaactcactatgtctatgacctgtagctctcatgctgataaaggttagaaatgcttat

SEQ ID NO: 2584 - DNA, 200 bp, Homo sapiens
  misc_feature (1)..(200): DMR20:10349401
atgacatagtggccaagcttgtttctcctgggggtgctctttcgaggatatttgggctgcctctgaagtcacagtgtcttggtgggcgggggtcgtgcagattttctttatgtgtgtgtgtatgtggctgtggacacctttcagcactgccttcttggccttcaaagcctttgctttggccttggctttaggagggacgg

SEQ ID NO: 2585 - DNA, 200 bp, Homo sapiens
  misc_feature (1)..(200): DMR20:10859101
tgcagaatgtgcaggtttgttacacaggtatacatgtgccatggtggtttgctgcacccatcaacccatcatctacattaggtattttgtggaaaaataagaacgccttttttttatttttattttttttaagacagacagaatcttgctctgtcaccaggctgtagtgcagtggcacgatcttggctcactgcagcctc

SEQ ID NO: 2586 - DNA, 2700 bp, Homo sapiens
  misc_feature (1)..(2700): DMR20:12109001
cacgtgtgagttactaaatctaccaatgcaaataaactgacattttcttggaatgacatcagagaagggctagtaatgtatgtatactagtaaactggaccaaagaagttgctattcagcttttaagcaaattctcaaaacagaccagtttctattgaaccaaaacagcccacttatagataaattgagttaaaaaaaaaaatccctgtggcaagcattatcacccaccataacaatggaaataaatgctttgtatatgcaattaggtgcagatccttaatcttactttggtggctccacttcatggagcagttcaaaattggactagggatagaggaatgaaacagcaccctgagagcccaactgaccagtgttactccaaggctggtccatgacgcaggagcactggcatcacccgggagcttaggagaaatgcaatactcgggacctgcctcaggcactctgagtcaagatgcctgagggtggagcccagcaatctgtagcttgagcagcttcccaggtggttctcctacacagccaactttgaaaaccactgctggcctggagcggtggctcatgcctgtaatcccagcactttgggaggccgaggcgggcggatcacgaggtcaggcgatcgagaccatcgtggctaacatggtgaaaccccgtctctgctaaaaatacaaaaagttagccgggcgtggtggtgggcgcctgtagtcccagttacttgggaggctgaggcaggagaatggcatgaacccaggaggaagagcttgcagtgagccgatatcgcgccactgcactccagcctgggcgacagagcgagactccgtctcaaaaaaaaaaaaaaaaaaaaaaagaaaaaaaagaaaaaaaagaaaagcactgccatcacctcttttcagataacaaacagataattgcatttaagcaatgaacacacccacagaatagcagtgacatgtgagtattctactgttactgagaaatactcacaggaggtttctaagggactgtgatgagaaatgggacatcaagacagggatttcagtccttattgcactgaaatatatttattacactagtcatctgaggataataccaagcaaagttggggactgaagaactaagaatgaaactggaagatatatatatttgcacttatttcccatactttgaatgttttcataccttgaatattgctttttcatgtaaaaatatatagctttttgtcatgtaatatatacatcactgtctatttcacagagatttctcacagaaagaaaagagactgctcagcttcaaatcacggttttatttgccttaataaaatgcctgtggaatttaatagaatacggtacataaaaactaatttaacttttattctagtggccacatctataaaagtacaattttcaatgaaggtagaaattctgtaaaatttaatcaccaactattcccaaaatagctgactatgaaatatattataattttcatttatgtgtccatttgtatcttattttacttgccatctatgaattctaaagaacattaatgtcttcagaagagtatattctttgttaaaacacctttatgttctcttatattactattgacattcatatggaaggaaaccaaaataattcaccccacaatatatttctttgacgtattttgagatggctatttagagagcttgcagaccgggatagccctgcaaagctgtcttttgtagaagagatttatacctgtagaaaaactaaagtgaagcaaaaaacagatacaaacagtctttctctgaggctctccctcgtacagatctaggagagagtaatgagagtttgacacctttgaaaatctgactaagaaactttaaccacagactaccatctatttttttgaggactgttatatgtgaggtttcatctgcataacaagaatgcttttgctagctcaaacatttctccttttctatttctgtccgtcagcactctgagtcaagaccctattttttctgtaacctcaagatggttaaaagcattaactatttggacattcttgttgtctttatgttttgtatgtctcctgtgcacatattgtgtttgcctttttttttcctgttaatctattgtctgttttatggactcaaattatcaaagcttcagggaaaagatttaaacttccctacaatatattagtttaacaaatatatattgagcataaagtatgtgccagccaccattcttggtggtcaaaacaaattagcaaccaaaacagacatggctgctgacggcatgggtttacaagctagaccaggtttgggaagacacacaaaatacaaatgcacaattttataatgtcacagggtgataaatgttgtaaataaaattgaagcaaggtgagtgcatcaagaatcatggtagtgctatgagctgggtggctaaagatgttctctgattaaatgactttctagggggaagaaagaagatgaaaggggtggggatggtaatatgggaaaaagggatctcaatgagaaccaatagagagtgcaaagactatgaggcaggaacatgctaggagtttaagaaagtaatggggccaatttggctgaagctggagaagagaggaaagtgccagaggtcagttgcacaaacctgtttgatttggtaacttgtaggcaatcgtctcttttaatgc

SEQ ID NO: 2587 - DNA, 200 bp, Homo sapiens
  misc_feature (1)..(200): DMR20:12306201
aaactctcagctccccaaggctttctgtgcatgtgctttatgttgtgcaattatcactttataaaataccgtccttttctccaggagctcctctatgtggttgagaacttaatcacatgctggtttacgcaacaaatgttggaattatgtcagtcatgtcctcccagagaggtcaagtagcccttgacataccttttctc

SEQ ID NO: 2588 - DNA, 200 bp, Homo sapiens
  misc_feature (1)..(200): DMR20:14262601
gttctagaagagaagaaagatggaggcagaactttgggtaggtgaaagaacatgaaaggagactaaaagggagaggtaggagagggagtggtgtcatggaggctagggaaagaaaaggtttaataagaaggcctgctcaataatcaactgcacagagaagtcaaacagcattactgaaaacaatctattggattttgcaa

SEQ ID NO: 2589 - DNA, 1200 bp, Homo sapiens
  misc_feature (1)..(1200): DMR20:14736301
aaattagtgattgccagagggagacaggagtggggagtgattgcttaatgggtatgggatttccttttggagtgatgaaaatgttgtggaactagatagtggtgactgctgtacaacattgtgaaagtatactgaaagtcactggattgtatacttcaaaatggcaaagtttaaatattaaaaaacctaaagtaaacaaagtgtttttcaaatatatcagtcagtaaccaaaccaaacatccttcatgtatttacatgaagtatctccacaacaacagtgatatcattaatatcagtgataatcatagataatgataacgtactcattatgcacaaggtgctattctaagagttttgcatggatttgcccatttaatcatcatgacgactctctgaaataatcttcatatttttattttaatatgagaaaaccaagacacagaaagtttatgacttatataacatcacatacatggttaataagagatttgattctaattggtctgtttccgaagccaaagctcttacccagtacattgtattgtctctgcagcaaaaaatggaaacaaatagatacttcttggacctgatttttttattagaagatgttaagaaaattatacaacagaatctgtatcaccattgtctttttttttagaatttttaaaatatactttaagttctgggacacgtgtgcagaatgtgcaggtttgttacataggtatacacatgccatggtggtttgctgcacccatcaacccgtcacctacattaggtatttctcctaatgctatccttcccctagcccccaccacccaacaggccctggtgtgtgttgttcccctccctgtgtccatgtgttctcattgttcaactcctgcttatgcgtgagaacatgtggtgtttggttttctgtttctctgtttgtttgctgagaataatggtttccagcatcatccatgtccctgcaaaggacgtgaactcatccttttttgtggctgcagagtattccatggtgtatatgtgccacattttcttcatccagtctgtcattgatgggcatttgtgttggttccaagtctttgctattgtgaatagtgctgcagtaaacatacatgtgcatgtgtctttatagtagaatcatttataatcctttgggtatatacccagtaatgggattgctgggtcaaatggtatttc

SEQ ID NO: 2590 - DNA, 400 bp, Homo sapiens
  misc_feature (1)..(400): DMR20:19605101
aaaaaaacacgttggcctcatctcaatcctggaatggtcctagatttgggaaactcccagagagtgtgggatggtcaaagatcaagcaaagagattattttcaccgtttgtacaaagtgtatgattgatcagatttacttaaggctccatcatcacacagtttaaccacagctgtctgatgtctaaagacttttacactgtgtttatttccagtcctttctcctgtgattttttttttaatcacttacatctactggctagtctgtttccaattaagacttctactaagctttctctacgaaagaggtttttcttttcttttctttataaaatgcatccttggtattagaacgtaatagcaacatatgagtttctgaagctgaagtcaactgattcttaa

SEQ ID NO: 2591 - DNA, 200 bp, Homo sapiens
  misc_feature (1)..(200): DMR20:22593201
gtgtatgtatttaatgtgtgtgtgtgtgcgcagtttatctacaatatacccaagatcttattgctagtgaaatatagttaaataaacaataacccaactttattacctagtatcgtctagctattataagcagtgatatctctatgaaataatataaaaagtatgatgattttataatgaagagctaaatagttgcagga

SEQ ID NO: 2592 - DNA, 200 bp, Homo sapiens
  misc_feature (1)..(200): DMR20:23275101
gtatttccaccgtgggggtctcttctgtcagaaacatagatcaccacctttgacaaaaaggcaaagacagtgaaggagaggaagggagagtggaattcactctgctttccagccacgggccaggtacttaatcaacacatacacggaattaaccactatcatcccctctttacagactaggaggctgaggcttagcaggt

SEQ ID NO: 2593 - DNA, 300 bp, Homo sapiens
  misc_feature (1)..(300): DMR20:30319601
tttcccagacactcacccttcatccctggacatctccagccagaggtcttttttctccttagcccagcttcccccacccagggcaatgttctttgccccagatttggaggtgggggtgtggtagtccccaccgtggttctgggtacaggcctctatgaactgaagccatgcacagcctggcatcctgtgtgcagccctactcctgttcgtggccacggaggcctcagccataaatccccaggtcttggctcataaccattagcaagcgattgggttcatcaggacgcctttatgagactg

SEQ ID NO: 2594 - DNA, 1500 bp, Homo sapiens
  misc_feature (1)..(1500): DMR20:30405101
gccaggccagccgccccatctgggagggaggtgggggggtcagtcccccacctggccagctgccccgtctgggaggtgagaggcgcctctgcccagctgcccctactgggaagtgaggagcccctctgcccggctagccgccccgtccaggagggaggtgggggggtcagccccccacccagccagccgccttgtccgggagggaggtggggtgatcagccccccacctggccagccaccccatccgggagggaggtggggtggttaaccccccgccaggccagccgccccctccaggagggaggtgggggggtcagccccccgcccagccagccgccccgtccgggaggtgaggggcgcctctgcccagccgcccctactgggaagtgaggagcccctctgcccggccagccaccccgtccgggaggtgggggggtcagccccccgcccggccagccgccccgtccgggaggtgaggggcgcctctgcccggccgcccctagtgggaagtgaggagcccctctgcccggccagccgccctgtccgcgagggaggtgggggggtcagccccccacccggccagccgcaccgtccgggagggaggtgggggtgtcagccccctgcccggctagctgcctcgtccgggaggtgaggggcgcctctccctggccacccctactgggaagtgaggagcccctctgcccggccagccgccctgcctgggagggaggtgggggggtcagccccccgtccggccagccgccccgtccaggagggaggtggggggtcagccccccacccggccagcctccccgtccgggagggaggtggaggggtcagccccccgcccggccagccgccctgtccgggagggaggtgggggggtcagccccccgcccggccagccgcccggtctgggaggtgaggggcgcctctgcccggccgcccctactgggaagtgaggagcccctctgcctggccaccaccaagtctgggaggtgtacccaacagctcattgagaacgggccatgatgacaatggcggttttgtggaatagaaaggggggaaaggtggggaaaagattgagaaatcggatggttgccgtgtctgtgtggaaagaagtagacatgggagacttttcattttgttctgtactaagaaaaattcttctgccttgggatcctgttgatctgtgaccttacccccaaacctgtgctctctgaaacatgtgctgtgtccactcagggttaaatggattaagggcggtgcaagatgtgctttgttaaacagatgcttgaaggcagcatgctccttgtttctttgttcacttgtttatctgctgaccttccctccgctattgtcctatgaccctgccaaatccccctctatgagaaacacccaagaataatcaataaaaaaaaaagaccctgtcccctccaaaataaataaataaataaataaataaataaataaataaaaagactgagatttgctaagcac

SEQ ID NO: 2595 - DNA, 13100 bp, Homo sapiens
  misc_feature (1)..(13100): DMR20:31215401
tggattcgaaaggaatggaattgaatggactggaatggaatggattttaatggaatggactcaaatgcaatggaatggaatggattcgaatggaatgtattggactcaaacggaatggagtggaatggtctcgaatgaaatgcaatggaaatgaatggaatcgaatggaatggaatggaacagaatggaacgaactcgaatggaacggaatgtaacggaatgaaatggactcgaatggaacggaatggacacaaattgattggaatggaatggaatggaacggaatggaatggaatggaatggattggaatgcacccgaatggaatgcaacagaattgaatggacccgaaaggaatagaatggaatggaatggaaaggaatcgaatggaatttaatggaatggactcgaatagaatggaatgaaattgaatggtctcgaaatgaattgaatggaatgcaatggaatggactagaatggaatggaatggaatggaacagacacgaattgaacagattaaaattgattgggctcaattggattggaatggaattgcatggattctaattggaatggaatagaatggacaccaatggaatggaatgaaatggactggagtacaatggaaaggaaaggaattgaattgaatggaatggacttgaatgcaatggaatttaatggatccaaatgaaatggaatggaatgaaatggaatggaatggaaaggaatggaatggaatggactcaaaagtaatggaatggaatggaatccaaaggagtggaatggactcgaatgtaaagtaatggaacttaatgtaatggactcttctggagtggactcttatggagtgaactagaaaggaattgaatgtaatggattcaaattgaatagaatgaaatggaatggaatcgaatggaatagaatggaattcactcaaatggaaaagattggaaaggacacaaacggaatagaatggactggaattgaatggaatggaatggaatcaaatggaatgcagtggaaagaaatggactccaatacaatggagtgaaatggactctagtgtaatggaatggaattgaacggactcgaatggattggaatgtattggaatggagtggacacgaatgcaatggaatgtaatggaatcaaatggtatgaaatggaaaggaatgcactcgaatggaatggaatggaatggaatggaatggaatggaatggaaagaatggacttgaatggaatgtaatggaatggagttgtatggaatggaatggactcaaatggattcgaacggaatggaatggaatggaatggaatggaatggaatggaatggaatggaatggattggactcgaacggaaaggaggggaatggtttcgaatggaatggaatggaaatgaatggactcgaacggaatggaaagtaacggaatggaatgaactcgaatggaatggaatgtaacggaacgaaatggactcgaaagtaatggaatggaaaggaatggattcaaattgaatggaatggaatggaatggaatggattggaatggacacgaatggaatacaatagaattgaatggacacaaagaatggaatggaatggaagggaatggaagggaatcgaatggaattgaatggaatggactcgaatacaatggaatggaattgaatggtctcgaaatgaatggaaaggtatgcaatggaatggacccgaattgaatggaatgggatggaacggactctaattgaactgcagggaattgattggtctcaaatggaatggaatggattccaactgaatggaatggagtggaagggactcgaatggaatggaatgaacttgactgcaatagaatggaaaggactctaatgcaatggaatggacttgaatggaatggaatggacttgaatggaatggaatggagccgaatggaatggaatggaatggaatggaatggaatggaatggaatggaatggaaaggaatggaatggaaaggaaggtaatggaatggaatggattggaatgcaatgcactagaatggaatagaatagaatggaatggaaaagacaaaaaagtaatggaatggatttcaaataaatggaatggactcaaatgtaacggaatggaatttaacgaaatggacacttgtggagtgggatggaatggactcgaatggaatgggtttcaatggaatggactagaaaagaatggaatggaatggtttcaaattgaatagaacggaatcgaatggactagaatggaatgcaatggaatggaatggactcgaaaggaaaagaatgtaaaggactcaaatggaatagattagactagaattgagtagaatggaatggaatggaatggaattgacaccaatggaatggagtaaaatggactcgaatggaatggaatggaattgaagggactcgaatggattggaatgtgttggaatggagtggacacgaatggaatggaatataaaggaatcaaatggaatggaatggattggaatggaaaggaatgcactcgaatggaatggaatggaatggaatggaatataatggaatggaaagaatgcactttaatggaatggaatggaatggactcgaatggaacgaaaggaatggcctcgaatggactcgaacgtaatggaatgggatggaatggactggaatggaatggtatggaacggaatgaactcgaatggaatagaatggaagggactcaaatggaatggtgaggaaaggagtggactcgaatggaatagagtggaatggaatcaaatggaatggaatagaattgaatggagatgaatggaatggaattgaatggaatagaatgctctccaatggaatggaaaggaacggaatgaaatttactcaaatgaagtggaatggaatggaatggaatcgaaagaatggaatggaatggaatggaatggaatggaatggattctaatggaatgcaactgaactgaatggacgcgaaaggaatggaaatgaatggaatggaattgaatagactagaatggattggaatggaatggaatggaatcgactcgagtggaatggaaaacaatggatattaatgaaatgcaatggaaaggaatggtctcgaatggaatggaatggaatggaatggacctgaatggagtggaatggaatataatggaatggaatggatattaatggagtggaaacgaattgattcgaatgaagtggaatataacggaatggaatcgaatggaattgaatggaatggaatagactagaatggaatggaatggaatgcactcgaatggaatagaatggactcaaatggaatggattggaatggacccaaatggaatagaatggactggaatgtaatggaatggaagacaccaaatggaatgggatgggatggaatggaatggaatggaaaggagaggaatggaatggaaccgactcgaatggaatggaatggaatggactcgaatggaatggaaaggaatggaatggactcgaattaaatggaaaggaatggaatggatttgagtggaatagaatggaatggactcgaatgcaatagaatgcacttgaatgcaatggaatggaatggaatggacccgaatgaaatggaaaggaatggaatggatttgaatggaatagaacgaacttgaatggaatagaaaggaatggaatggaaaggatttgaaaggaacagaatggaatgaacttcaaaggaatggaatggactcgcatgcaatggaatggaatctaatggaatggacacttatggagcggaatggaatggactcgaatggaatgggtttgagtggaatggactagaaagtaatggaatggaatggattcaaatggaatagaatggaatggaatggacttgaatggaatggaatggaatggatacgaatagaattgaatggactccagtagaatggaattgaatgtaatggactcgaataaaatataatggaatagaatggaatggactcgaatggaatagaatggaaaggattcgaatggaatagactggactcgaattgaatagaatggaatgcactcaaatggaatggagtggaatggaatcgagtcgaatggaatggagagaaacagactcgaatggaatggaaaggaattgaatggactcgaatggactggaatgtgttggagtggaatggacacaaatgtaatggaatgtaatggaatcaaatggaacggaatggagtggaatggaaaagaatacactcgaatgcaatggaatagaatggactcgaatggaatggaatggaatggactcgaacgaaaagcaatttatttgaatggactccaaaggaatggaaccgaatgaaatggaaaggaatggaatggaatggaattaaatggaacggactcaaatggaatggagtgaacttgattggaatagaatggaatggactggactggaatggaatggaatggaatgcaatggaatggactcaaatagtattggatggaattgaatgcactcgaatggaatggaatggaatggactcgtgtggaaatggttttaatggattgcactagaaaggaatggaatggaaacgaatggaaagaaatggaatggacgagaacggaatggaatggactcgaaaagaatggaatggaatggaatggaagggactagaaaggaatagaatggaatgcaatggaatggactggtatggaatagaatggaatggactcgaatgtaatggaatggaatagactcgaaaggaatgagatggaattgaatggactcaaacggaatggaatggaaaagactcgaatgtaacaggttggaatggaatggactcgaatggaaaggaatgcaatggactcgaatggaatggaatggaatggactcggatggactcgaacgaactggaatgggatggaaaggaagcgaatggaatggaatggaatggaaagaattcgaatggaatacaatggagtggatggagagggaatgagtggtatcaaatgaaatggagtggaatggaagaaaatggaatggaatagaattgaatggagatgaatggagtggaatataacggaaaagaatggactggaatggaatggaatgaaatggaatgaaatttacccaaacggagtggaatggaatggaacggactcgaaaggaatggaatggagtggaatggaatggaatgcattctaatgaaatgcaactgaattgaatggactctaaagaaatggaaaggaatggaatggaatgcaattgactcgaatgaattggaatggaatggaatgaaatggaatggaatggaatggattgaatggaatggaattgagaggagtggaattgaatgggtttgaatggattggactcaaatggaatggaatagaaaagaatggattcaaatggaatagcatggaattgaatggactcgaatgcaatggaatggactggactcgaatggaaaggaatggactcgaatggcatggagtgggatgtactcaaatggaatggaaaggatttgaattgaatagaatgaaatggaacataacggaatggaatgaactacaatggtatggaatgtaaaggaaagaaaagaactagaaaggaatggaatggaaaggattggaatggaatggaatggagcagaatggaacggattggaatggaatggaaaggaatggactcaaatggggtggcatggaatggaatgaaatctaaaggaatggaatgttatggacacgaatggaatggaatggactcgaatgaaatggattggaatggaatggaatggaatgtactcgcatagaatagaatggaatggaatggactcgaaaggaatggaatggaatggacacgaattgaaaggaatttaacggaatggaatggaatggaatggaatggaaagcaatagaatggaaaagagtagcaaggaaaggaatggactttaatggaatagaatggaatggaatggaacggactcgaatgaaatggaaaggaattgacgtgaatggaatggaattgagtcaaaaggaatttaatgtaattgaatggactcgaatggaatggaatcaagtggaatggaatggaatggacttgaatgaattgaatcgaatggaatggactcgaattaaatagaatggaatggaatatgctcgaatggaatggacacgaatggaatggaatggagtggaatgcactggaatggaatggagtgcaatggaatggaatttacttcaatttaatagaagggaatggaatggaattgactcgaataaaatggaatggaatggactcgaatggaatggaatggacaagaatggaaaggaatgcaatggactcgaatggaatggaatggaatggaatggaatggatgcgactggaatggaatgaaatggaatggactcgaatagaatagagtagactggatttgaatgaaatagaatggaattgaatggactcacgtcaaacagagtgttatgctatggaacggactcgaatgtaatgtaatgtaatgaaatgaaagggattcgagtggaatggaatggactcgaatggaatacaatggaatggactgtatacgaatggactcaaatcgtatggaatggaaataaatggactttaaaagaatggaatggaatggaatagaatggaatggaatggactctaatggaatggaatggaatggaatggactccaaaggaaaacaacggactagaatggaatggaatggaatggaaattactcgagtggaatggcatggaattgaatggactcaaatggaatggagtggactcgaatggaatggaaaggattggacccaattggaatggaatggaatggaatagaatcgtatggactcaaatggagtggaatgttatggaatggaatgggcttgaatggaatagaatggaatggaaaggaacggatttcaaatgaatagtatggaatggaaatgaatggaattgaatgaacatgaaaggaacggaatggaatggaatggactcgaatttaataaaatgcaacttaaaggtaaggatcctactggaatggaatggaatgcactcaaatggaatagaatggaatagactcgaatggaatggaagggaatggactcaaaatgaaaggaatggacactaatggaacagaatggaatggaatggaattgactcgaatggaaatgaatggaatggacacgagtggaatgcaatggaatggactcgaatggaatggaatggaatggacacaaatggaatggaatggactcgagtggaatggaacgtaatggagtgaaatggacttgaatggaatggaatggaatggaatggaatggaatggaatggaatgtagtggactcaaatggaatggaatgcaatggaatggactcgaaaggaatggaatggtattgagtggactcgaaagcaatggaatggaattgacttgaaatgaatggaatgcactcgaaagaaatggaatgaaatggactcgattgcaacggaatggactcgaattcaatggactttaatgatatggagtcgaatgaaatggactaaataggaatggaattgaatggaatggaatcgaatggaatgaaaacgaatgtaatgtgttcggatggaatggaatcgaatggaatggtatgcaatggaatgcaatcaaatggaatggaattgaatagaaaggaatcaaatggattggaattgaatgcaaaggaatcaaacgaaaaacactggaatggaaatgaatcgaatggaatggaaaggactagaacggtttcaaatgtaaaagagtcgaatggaatggaatcgaatggaatgaaatcaaaaggaatggacttgaatggaaaggaatgaaatggcatggaagggaattgagtcgaatggaatggaatggaatggaatggaagggaatgatattgaatcgagtggaatggaatggaatcacatggaatagaatcaaaagcaatggaaaggaatggaatcgacttgaatggaatgaaatcaaatggaatggaatcaaatggaatgcgatagaatagaatgtaatggaatggaatagaattgaatggaatggaatgaaatgcaatggaatcgaacggaatggattgtactccaatgtaaagtactggaatggaatggacttgaatggaatggactcgaatggaaaggattcgaacggaatgggcccgaatgcagtggattcaaatggaatggtcttgaaaggaatgctatagagtggaatagaatcaaatgcaatggaatataaatgaaatggactgtaattgaagggactcaaaaaaatggactagaaaagaatggactcgaatggaattgaacacaatggaatggaatggaatggcataaaatggaatatactcgaatgtataggagtggaattgaatggaataaaatggaatgtacttgaatgtataggagtggaatgtaatggatgtgaatggaatcaacccgaatggaaagctatcgaatccaatggaatggactggaatggaaagcaaaggaattgattggactcgaatggaatggactggaatgatatagactcaaaagttttgtactcgaaaggaatggaatcaaaaggaatggaatccaatggaatggaaacttatgtaaggtattcgaatcgaatgaaatggaatcgaattgaaggggtatgaatggaatggaatggaatggaatcgaatcgaatttaatggaattgaataggaaagaatcaaatggaatggaatcaacccgagtggaatggaatggaatggaaaggaatggaatggaatggaatggaatggaatggaatggaatggaatggactccagtggaaaagactggaatggaacggtttcgaatgaaattgaatcgaatgaaatggaatggaatgcaatggaatcaaatggaatggacttgaatggaatggaatggaatggaatggaatggaatggaatggaatggaaaggaacagaatcaaattgaatcgaatggaatggaagggaatggaattgaatcacatggaattgaacggaatcaaatggaatatcatcaaatggaatggaaaggaaagtaatggaatggaatagaaaggaatgaaatccaatgcaatggcatgaaatggaatggaatcaaatggaaagggaaagaatggaatgaaatggaatggaatggaatggaaaggaaaggaatcatatggattagattcgaaaggaattgaaaggaatggaatggaatggaatggaatggaatcgaatggaatcgaatggaatcgaatgggtggaaattgaatggaatggcttcaaatggaatgggaaaaaatggaattggaaaaaatggaatggaacggaatggaatggaatgctatggaatggactcgaatgtaaaggactggaaaggaatggactcgaattgtaaagacacaaatggaatggaaactattggagtggaatcaaaaagactggaatcgaatggaaagggattgaatggaattgaatggaatggaaaggattggaatagaaaggaatggaatggaatggaatggaatggaatggaatggaatggaatggaatggaatggaatggaatagaatggaatgtgctcgaataaaaagactagaatgcaatggacttgaatggaatggactcgaatggaaaagatttaaaaggaattaacacaaatggaatggattcaaacgaaatgtctcgaaaggaatgctatcgtgtggaatggaatcaaataggatggaattcaatggaatggactgtaactgaatggactcaaaaggaatggactcgaatggagtggactcaaatggaacggaagtgaatggaaaggaatcgaatagaatatactcgaatataaggaagggaatgaaatggacttaagtggaattgacttgaatggaatgaaattgaataaagtggaatggaaatgaatggaaaggaatggaatggaatggaatggactgtaatgcaatggactcgaatgtaaagggctggaatggaaaggactcaaatggaatggaatcgaatggaatggactcaaatgcgtccatttgaggaatcgaatggcatggaatcgaatagaatggaaccgactggaatggaatggaatggaaaggaagggaatggaaagggatctaatgtaatggcatggaatggaatggaatggaatggaatagaattgaatggaatggaatgtactcgaatgtaaaggactggaatggaatggacttgaatggaatggacttgaatggaaaggattttaatgcagtggactagaatggaatggattcaaatcgaatggtattgaatggaatgctatacagtgtaatggaatcaaatgggatagaatcaaatggactgcactgtaatagaatggattcgaaaggaatggactcgaatggaatggactccagtggagttggaaaggaatgtaatgtaatggaatggaatgaactcgaatgttaaggactggaatggagtggactggaatggaattgactcgaatggaacgcaatcaaatggaatggaatggaaaggaatggaatggaaaggaatggaatggaatggactgtaatggaatggaatagaaaggattgtactacaatggaatggactcgaatagaatggaatcaaatggaatggattcgaatataatggaatggaatggaatggaatgatacggaatgaaatggaatggactcaaaaggaatggactggaataacatggactcgaacgtaatggactcaaaaaaaatggaattaaatgaaaagaaatcgaatgcaatggaattgaatgcaatggactggaatggaatagacttgaatagaatgcaatcaaatagaatggaaacgaatagaacggatacgaatggaatggaaaggaatcaaatgaaatggaatcaattagaatggaatgggatggaatgggatggaatggaatggaatggaatggaatggaatggaatggaatggaatgcaatggaatggactcaaatgtaaaggattggaatggaaaggactcgaatggaaagcactcgaatggaatggactcatattgaaaggaatcaaatggaatggaatgcactcgaatgtaaaggactgcaatggaataaactcgaatcgaatgtactcaaatggaaatgatgtgcatggaatggagtcgaatggaatggattcaaatggagtggtctcaaaaggaatgctatcgtgtggaatggaatcaagttggatggaatcaaaggaaaggactgtaaaggaaatgagtcaaaaggaatgtagtcgaatggaatggacttcaatggaatggaacagaatgcagtggaatggaatggaatgtattcgaatgtaaaggactgcaatgtaattgacttgaatggaattgactcaaatggaatgcaatggaatggaatggaatggaatggagtggaatagaatcaaataggaatggaatggaattgaatggaattgactctaatggaattgattcgaaaggagtggactcgaatggaatggactcgaaaggaatgcaattgaatgcaatggaaatgaatggaatggagtagaatgctatggacgaaaattgaatggaacggaatgaagtggactcgaatggaatggactggaatgataagcactcgaatggaatgtacttgaatggaatggagttgaataaaatcgaatggaatgcaatagaatgaaatcgaatggaatggaattgaatagaatagaatcaaatggaaaggaataaaatgcaatggaatcgaatggaatggaatggaatggaatagaatgtaatcgaaaggaattgaatcgaatggaatggattcgaatggaatggaatagtatcgaacggaatggaatcaagtggaatggaatgggatggaatggactggaatgaaatggaatggaatggactcgaatgtaaagggctggaatggtaagaactcgaatggaatggactcgaatggaatggacttgaatgtaaaagcctggaatggaaaggactcgaatggaatgaactcgaaagtaatggactcaaatggaatgaaatcgaatggaatggaatcgaatggaatggaattgaatggaagggaatgggattgaatggaatggcatagaaggtaatggagtggaacggaatggtatttaatggaatggaatggaatcgaattgaatggaatggaatggacacgaatgaaagactggaatagaaaacacttgaacggaatggacttgaatgtaaatgattcaaatgcaagggactcgaaaggaatggattcaaatggaatggtctcgaatggaatgctgtagtgtggaatggaatcaaataggatggaatagaatggaatggactctaatggaatgcagtcgaaaggaattgacatgaatggaatagactcgattggaatggaatggaatggaatggaatggaatgtactataatataaaggactggaatggaatggagttgaatggaattgactcaaatggaatgtaatcaaatggaatgcaatggaaacgaacggaatgcaatggaatggaattgaatggactgtaatggaatggactcgaatggaatggattcgactggaaaggactcgaatagaatgcaatcgaatggaatggaattgaatagaaagaaatcgaatggaatgtaatcaaaaggaatttacaggaatgatatggaacggaatagaatggactaaaatggaatggacaggaatgatatcgacttgaatgggatagatttgaaaggaatggaatcgaatggaatggaatagaatagaatgaaatcgaatggaagtgatacgaattgaatggaatggaatcgaacggaatgggttcgaatggaatggaattgaatagaacggaatggaatggaatgggatccaatggaatagaattgaatagaatggaatcaatcggagtggaatcgaatacaatggaatggaatgcagagactggaatggaatggactcgaatggattgtaattgaatggaatggattctaatggataggaatggaatcgaaaggaatggaatcaaatggaatagattgggatggaatggaatgcaatggaatgggatggaatggaatggaatg

SEQ ID NO: 2596 - DNA, 1900 bp, Homo sapiens
  misc_feature (1)..(1900): DMR20:33483901
ccaatatcacaccactgtactccacactccagcctggtcgacaaagcgagactccatctcaaaaaaaaaacaacaagtttttgaatcaaccttgtgttccctgggtaatcctaatttgttcataatgtattatactttttatatattgttagattccatttcctaatattttctttctttctttttttttttttttttttttgagatggagtttaactcttgttgcccaggctggagtgcaatggctcgatcttggctcaccgcaacctccacctcccgggttcaagggattctcctgcctcagcctcctgagtagctgggactacaggctcgcgctaccacgcccagctaattttttttttttttttgagacaaagtctcactcttgtcccccaggctggagtgcaatggaacgatcttggctcactgcaacttctgcctctgggttcaagtgattctcctgcctcagcctcccgagtaactgggattacaggcgcctgccaccatgtccagctaattttttttgtatctttagtagagacggggtttcaccatgttggccaggctggtctccagctcctgacctcaggtgatctgcctgtctcgacctcccaaagtgctgggattacaggtgtaagccaccatgcccggccaatttttgtatttttagtagagacggggtttcaccatgttggccaggatggtctcaatctcctgacatcgtgatcctaccacctcagcctcccaagtagctaggactacagagatgcagcactatgaatggcaaatgtttgtattttttgtagagctggagttttgccatgttacccagcctggtcttgaactcctgggctcaagcaatccacctgcctaggcctcccaaaatgctgggattacaggtatgagctgccatgcttggcctaaccataaatgtaattttttttctgagacagagtcttgctctgttgcccaggctggagtgcagtgatgtgatctcggctcactgcagccttgacttctcaggttcaagtgatctttctacctcaacctactaagtagctaggaccatggtcttgtgccagcatgcctgctaacatttaaaatttagtttttgtagaaacagggtctcattatgttgcccagtctgatcttgaattcctaggtttaaggaatcctcccaccttggcctcccaaagtgctgggattacaggtgtgaaccaccgcacctggcctaatattcttaatatatataggatattcagatgatcaccttattcagtaagctttagtagttggcatctttctttttttttctttttttttttttgagacggagtctcgctctgttctccaggctggagtgcagtggcacgatcttggcttactgcaagctctgtctcccaggttcacgccattctcctgcctcagcctccggagtagctgggactacagacggccgacaccacgcctggctaattttttttgtatttttagtagagacggggtttcactgtgttagccaggatggtctcgatctcctgacctcgtgatctgcccgcctcggcctcccaaagtgctgggattacaggcgtgagccaccgtgcccggccagtagtttgtatctttcaaggaaattattgattttatctaaaatgtcaaacttgagggcataaaattcttcataatagttctttttttttttttgaaatggagtctcactctgtcacccaggctggagtgcacaatctcagctcactgcaacctccgcctcccgggttcaagcgattcttgttctttttttttttttttgagatggaattttgctgttgttgcccaggctggagtgcagtggcgcgatctcggctcaccgcaacctccaactcccaggttcaagcgattc

SEQ ID NO: 2597 - DNA, 300 bp, Homo sapiens
  misc_feature (1)..(300): DMR20:35650401
tcatcttcaaacaacccatttttctaaaatgaaaatagctttccaatggagaaaatatctgtggctgaaatacaactctcaagcagtgctgaagttttttgcattgtctttggaatgagaaatgattacttaacattaacttaaattaaacagcatatacaaacgttatattgcttttgaaattgaggaggcagtatctagtgatcggtcaaagcaaatctgtattcatgaattatcaaaagacccacaacatagtcacctcttgagtctaaacaatccttctcttaaacaaaaatcctg

SEQ ID NO: 2598 - DNA, 300 bp, Homo sapiens
  misc_feature (1)..(300): DMR20:36543101
agcacgggagaggagggggccggcatctggggacaatggcactcccaactaggtcatgggtgagaaggaattctgtctaccttcctgaaccatgcaagaaacactgagggctgggtgtgtcggtccgtgggacacgggcaaccactgtctcatgactacaggcagtgatggccctggggaccagctggggctggccgggatcccagtccagggttgatgatctcaaaggccaaggaccgagaatgacttcaacagagtcatgggaggaaggcctggaaacagctcaagttgcaaccacac

SEQ ID NO: 2599 - DNA, 1000 bp, Homo sapiens
  misc_feature (1)..(1000): DMR20:37154201
tatacttaaattggataaattcattgtatacaaattatacctcaataaaattgatttaaaaaaaaactatggaccttcctcagaaaaatccagaagaggacgggcgtggtggctcacgtctgtaatcccagcactttggaaagccaaggaaggaggaccacttgaacctgggaatttgagaccagccagggcaacatggtgaaaccccatctctaccaaaataaataaataaataaataaaaattagccaggcgtggtggcgtgtgactgtagtcccacctacttggaaggctgaggcaggaagattgcctgaggccaggagttcaaggctgcagtgagctatgatggccccactgcactccagcctgagtgatggatcaagaccctgccttgaataatgatcatcataataatgagatgccataggggagatgattcagaactgagaagtgagagagagaaagagaaatgtgaggatctgaagaggtgccatagtaccactctctttgagttgctgggagatattgaagttgatttatttaaatttgcctgctgtactcaaatataatactatacagagactagccaccatgggcctcaggtattttcaggttatagttactatatcattatgttccagctgttgtgttaagcaatggagatgcaaagattaatcaacacagcaactggccccaagctgctcaggagaagagcagataagaagacaatgctaagtgctatgatagtacatgagcacgaaggggacacagaaccagcctggggagttataaagaggaggagaaatcggcagtgagggaatggctttggatctttcctcctctgcaactgaagggccgctcaccttcaagttgagatgtttggataggcacttcagaacttgagccatgctggccgtggcccgttcccgctcatggtctttgactgactgtaaccaggggaccaagtgctgtgagaaataaagggaggctaaatggtttat

SEQ ID NO: 2600 - DNA, 400 bp, Homo sapiens
  misc_feature (1)..(400): DMR20:38121401
ttttggtttgagatggagtctcactctgtcacccaggctggagtgcagtcgcgcgatcttggctcactgtaagctccgcctcccgggttcaagcgattctccttactcagcctcctgagtagctgggattacagttgtgcaccaccacacccagctaatttttgttttttagtagagatggggtttcaccatgttggctaggctggtctcaaactcctgacctcaactgatccgcctgccttggcctccccaaagtgctgggattacaggcgtgagcgccgcgcctggcaagagtctggcatcttttacttaacatgttagcaagattcaaccatgtttgctgcatgcagctgtactttgtttcctctcattcctatagcggcccttggaatgacaatac

SEQ ID NO: 2601 - DNA, 700 bp, Homo sapiens
  misc_feature (1)..(700): DMR20:38582301
gtgggagaattgcttgagcctgggaggtcgaggctgcagtgagccgagatcacaccactgtattccagcagacagagtgagaccctgtgtcaaaaaaaggcctcttcgtggggaccacttgacctcctacctcctgctgctgagtgccatgacctttggcaagctaggcagggagggcgcagcacatgccgccagcaatggtcagatgttgttgaggcagggtgagaagtccctccccacacccctgctagccccatgatctcaaatgtaggggcttataattatgtaattattgggagttcctggcaagaacttgggatgtccttttgtttctagaaagtgtttatttaaagtatattctcctcatagtcctagggtagaccacagccctccctgaggggcacggtttaggcattgggccccacagctggtagggagtcagccttgtttgcatactggcgataaaagttgtctctctggagtctggaagatatgagttcagatatcatccttttttttttatttttattttttgaaacagagtcttactcttgtcagccaggctggagtgcagtggcacaatctcggctcactgcaacctctgcctcctggcttcaagcgattctcctgcctcagcctcccaagtagcggggattacaggtgcccgccatcacacctgtctaatttttgtatttttagt

SEQ ID NO: 2602 - DNA, 900 bp, Homo sapiens
  misc_feature (1)..(900): DMR20:39622001
tagtagtggtgtaaattggtacaacccctttagaaaatggtttggcaatttcttaaaaagttaaaaatatgttatcatatgatccagccgtttcactcctaaacattttcccatgggaaataaaatcttaagtctttacaaaggtgtgtacacaaatgttgacataagcttaacttgtaaccaccaaaaataagaaataatctaaaagcccatcaagagacaaataaacaaagtgataaattaatataatggcatactactcattaataacaaggaataaacttgatacatgtgacaacaaccatgaatgccaaagtaattgtactggatgaaagaagccagccctccccctcagacaaaacaaacaaaagaggccaggcgctgtggcttatgcctgtaatcccagcacttagggaggccaaggcgggtagatcacttgaggtaaggagttcgagaacagcctgggcaacatggcaaaagcctgtctgtacaaaaatacaaaaaagtatacaaaaaatcagctgggcatggtggcacatgcctgtggtcccagctaatcgggaggctgaggcaggaggtggaggttccagtgagctgtggttgtgccattgcactccagcccgggtgacagagtgagacgctctctcaaaaacaacaacaacaataaacataagaaagtgatttggctgtaacatgcatgcaagggaaggatcaggaagaatggactcacaaagtattttgggggcttggctaaaatgtttttactcaattttggcataagttaggttagcagatgatatggttttgctgtgtctctacttaaatcttatcttgaattgtacttcccataatgcccatgtgtcatggacagtaattgaattatgggggtggtttccccca

SEQ ID NO: 2603 - DNA, 2500 bp, Homo sapiens
  misc_feature (1)..(2500): DMR20:40739201
tgataaattagttgttgggtttcctcgacagcctggatttataagagcacaattctaacataatttattagatctataaacagacagatccaatgtttttactgagattacatcttgtcaccctcagatattgtgtcgctgacagccctgttataatttatttttattattctgataaggtgttgtttccagggatttatttatttttccccctaaaaagacattttcatttttagctggaaaggaatcagaaactttaatgctagcagatctccagtagccacccagacagcttttccatactatgactgtgagcttctaaagagcagagctgaagttttagcatgaattagtgcatggcccttggcctggggaatggcaggaagacataagggagaatctgtcgggtggcattggggcctgtttgaggatcttcctcttgttgaaacatcagcctgtgattgatatccttccatagagtttctcacctttgcaggctgcccgcctccctccacacctgcctttcaggccaggcagggcacagaagagtctttcctggctctggccatcactcacctgagcctgaagctaacatgtagcttcctggacaacagtctcccacaaagctattctaagccagctcctcctgaccatgtaaaaagaggggtgcgtgtctactctcaaagcccctctaggcaaagggtcacaggtctgagtgaccaacatctaccagtaaaggacagtggccttgccaagaactgcaagggagaggcaatgctggagttgtatgtccagtccaaagaacacagatggtgagaaaacaccccacttagaggcaatcagattagggttgatatccctccaggtagctgtgacttcaggcattctacttctcctttatgagctattgcccatctgaaacatagcagtgatgacacctgcctcatagtcctggtgagaataaaatgagataatgaacatagagtgttgctttattagctaaagtactgtgcaaaggaaggatacctttattagcattaacatctctaagctctagagatacatttttttaatctggaagggatatttttaatgttgttttttattttataataatgataatcttcatatagctttaaattttaccaggtgcttgcatatgatataagataacaagatcgttttcatctccttataatttggtgaagataggtgacttgtttgtctccattttatggataaagaaactaaggctcatggaggtaacccagagttagtccactggttacaggattctaactcacaacagaacaaccctacatccattactttgtacttccaataaaatcagggctttctctgctccaggttcaaatgaagcagagcatggctctggggacaatcagaatgaaagtttgtcaccagctccctgttctcgagagttcagtcacagcttgctcataggagaaatgatttgggtcaattcaccaaaagcctggggtacaggtgctctagggtttcagctccactggctttcagggccagcttccgtccccaaggccagaggcaattcttggagtcattcataaagccctccatgtctcatggggagaaaagaaattaatatcagaagtggcagcatctaagcggcagcttcataacaggcttgaacctcgacatcttggctacaactgggaacggctcagccaagcacgtcattgactcccagagtcctgaacccgagatgtgcatgtgggcttgtaggtcacccagtccagcccccttattttatagatgaggaggttgtattccagcgaggggagagggctcacccaaggtgacacagtgggtagggggcaaaatcagggttggaaccaggtctcgtggttcagggctctttccagcattgggttctgcatcaggcatactctatcattggaagcttttatgagacccagtaaaacagaggctccatcaaaacaccaaatacgcaatgtgcaaccctgcacagatctgttaagccatcactgcaacagcaggagctctacctgggagggaggcccataccccatcaccattcaccccccttggccttgaacctcttgcctcaatccactgtgaatttcagccctcccttcctttcccagctgcagcctgatcttactcttaaggcttaatgctaagatgtgctgattttctggatctctttctctgttctcattaaagttttccttccagaaaattctgcctcaggccaccctggtagttgttctccagcctcatccgatcctcaagaccctttcctaggagtggtatgggaagaaaaccaaagctttcaaaatacaatgtcagctgaaatattgcatcttcagggaaggcttccctgaccccaaccacctccactcaagactggatccgtttctcacatcctttgcaagcagctcttagtgtttgtaaggagacttgggtgtgatttctagatcagcacgtgtctccccca

SEQ ID NO: 2604 - DNA, 1200 bp, Homo sapiens
  misc_feature (1)..(1200): DMR20:46561301
ccacccaccttgggtgcatgtcgtcaggacctcctgaagctgtgtcacaggcgtatgtccttaacttaggcaaaataaacttcctaaatttactgagacctgtctcagatttttggggttcacaggggccaccatggcttcagcacttctctgctcctgtcagttgcccttttaacaaggagaggcccagaaccttctccaggcagctgctatcagggagagcttaattcttttgtttttgccgctttgcatttatttttaggtttactggccatggcatatattaataataccggttttccattgatggatgcactggaaacatttcttctggaatattcttattcaagtttttttttgttttttttttttaatgtcaagctgatttagtaaaggtgttaaataaatattaccacggacgggtgggggacatactgcgtgtgctgtcctgcctctcttctaagggcacagaggtggaagccctggcaccttcggaggattagagggagtcgggccgacatgttggggaaactgggggaggattgggtctccctttgccagggctcaaaattcctgctggtcccatgttagctacttcattaacacctaactcattactctcaggagcgaacctgcaggtgggccatccctgcccgggactggctgaccgggggtgccccttgtacccctccacatctcttgcaagtctctacctcttggggactctccatttctctggctgtctttattctccaaatctatgctgtttgcattgctgccctctcagtctttttctctaagtagcctccctgcttccacacttgtccctcccaccctaacgattcactccagccagcagccaaaatgatcttctacagacagaagtgaaatcacatcattgccctgcttaccgagggtccccactgtggtttgaataagataccaagtctgtcctgtccccgctgttccctgacctcgtgtctccaacctcatccttctccaactccactgcagccaccccagcctcctggccctgaatttctggagcactcgctgctattcctctcttccaggcctttgtacctgctgtgccctccattgggactgctcttcccctttttctctgtgaggctggcggcttcccatgatcatcagctcccatgtcaccttcctggagagggcttccctgccacccctctc

SEQ ID NO: 2605 - DNA, 900 bp, Homo sapiens
  misc_feature (1)..(900): DMR20:46639701
atggcctccactgaaccacaaaagagtttgggtttccaatgaggcagacctaggctcaagtgccaaccccactattttgtcaatggctatgagatgctgggcaaatggcttaatctctctgagcctcaacttcctcatctgtaaaatgggtccatcacctctgggtcatactgcatggctgagaacacagaccctggagccagaatggtgaggtttgaatcttacctcggccacttcccagctgtgggagcttgggcaagtgagggaaccactcggtgcctcagtttcttcgtctgcaaatgtcagtaataacacaccagcccacagagccacagtgaacataaaaaagctcacaagcatatcatgagtgcttagaaccatgcctggcacttagtagatgctagaggtgctggctgtggctcttttgaagtctcctcgggggacagaggagagtgcaagaataaggcatgtgatgtggcccaggacatcaacaaagctgaggtcacttcctacagcctcccaggtgtcggcactttcttgtaggggagctgagtacagtggaaatcgaagtcctctctctgcgcagagggctggtaaggtcctgcaggagagtagagctaaaagggtggggaagggacttcaccaggttgaccggcagggcaggggcttgctggcctccccggctctgctccaatgtctttttctagctggggctcactgttgtgttctgcctatgggtgctcctaccagcaccacaggcaccttcccatggctgtccctcttcgtgtgaatttcaaggacaaacaaaaagagcagagagtctggactctctgcagataatagcaacagcagcaatcctttattaagcacctactgcgtgtcagcacctttgagccttcc

SEQ ID NO: 2606 - DNA, 300 bp, Homo sapiens
  misc_feature (1)..(300): DMR20:47404401
ggcatgctcaacttgggctgagacactgtttgatgaaaggcttactgaggaggatggctgaaaagaattcccataagcagaaattggagtagggctggacgtttgaatcaattaaaaatgttttgagctgtgagcagtggctcacacctgtaatcccagcactttgggaggctgagtcaggaggatcacttgagtccagcaggtcaaggctgcagtgagccatgatcaggccactgcactgcagccttagtgacacagcaagatacacacacacacacacacacacacacacacacacac

SEQ ID NO: 2607 - DNA, 1200 bp, Homo sapiens
  misc_feature (1)..(1200): DMR20:49000501
atggtatcactttaaataatcaactaactcagcaccatcttacccactattctgagtaaacaaattcctaattggaccaattgaaataattgatgtgaatttgcttgagaaagaaaatgtgaatcattgcgactactgtaccttgtattcttgtccaaacatgtgacagctaagccagaacaaacgctgctcatttattccacaagatcatttggctagcaactgtggaatcctttgttctctcagaaatgactagctaaaagtgttttggtaaacgttttcccaactctttaaagtctgcattttgtgttcattgggacttctgttttgggaggggaacatcagtttgctcaagttactcttcccacctgtgattctgttgtgaagaatctgtgtgtgccaattctcagtatgtatggaccacttacaggcaaggttgggacatagggtggcaggtgggaaccagacatttaattgtcatcaacttcattacaaatgtctgtttatttaatcagtgctgtttaagcaccaggtcatggaaaactcaggaactctttttttttttttttttttttttttgagacagagtttcgcactgttgccaggctggacggcagtagcttgatctcctctcattgcaacctctgccttccaggttcaagctattctcctgggactacacacatgcatcaccacacctagctaatttttgtattttcagtaaagacagggtttcaccatgttggccaggctggtctggaactcctgacctcgggtgatctgctcgcctcagcctccgaaagtgttgcgattacaggcatgaaccaccgtgcccggccctcactctgggactcttaactttttccaccaccttggaaagatgttcttcccattgtgaactggggcacttaagaatcttgcagatttgaagaaatagatatggctcaatccagctgtaacttagccctcaggttgctggcagagttgttcgcacagtcacatgattctcttgaactaggggcaccagccctgtgtcctggatgagcaaagcttcacactaagcatggtgtgtatgcctggagcatctgttttacctggatatttaagaaaggaatattctttttgttagtctctaattacattaacatactcccctttacacaaaaattacagctaaaacatctttggccaccctccccc

SEQ ID NO: 2608 - DNA, 600 bp, Homo sapiens
  misc_feature (1)..(600): DMR20:50038501
agtgactatctccaggattgttggaaaacctagagattcgatgagaatgggaaccagccagccccaagtggtgcccatatactgtcatccctgccaccctcttcaccttcccagccccgaagttccccagctggcagggatgagtggagaggcccctgtcaatggtgtctgtgctgaacaagtcccatttgctgctgcctcctccccaggccagaataaacgtgcacctgccccaggtcacagagcacacagcagggagccgagggggtggggcagggagctgagggctggagcagggctcctggtgtctctgaggacaaaacagtccattgtggccctgtgggtattgagggaatcacagggcctgaatggaggcgggtgaggaggcagggcaggtgtgggagcaggtgtccacggtcatcccacggcatcgcccctggggggaagtgcccccctatgcgtgccctggaaccggcctggctggtcggacacctgtcccctgcagcttcttgtcaggagacaacataggcgtgagccaggccccaggggtggggtgggatgagggagtggggggtgggatgagggagtggggggtgggat

SEQ ID NO: 2609 - DNA, 1200 bp, Homo sapiens
  misc_feature (1)..(1200): DMR20:50922201
ccaagcagcggacaccagctgagtatcctctaatttggttctgacactgtctacctggatacagtgtcatattccacaagatgggggctcagtccccaaaactgctctctccttcttcagactccaactgtaagtctgggcctccagaacttctgactgacacttcaagctggggttcccaagaccccctccttgagttctattaatttgctggagcatctcacaaaacttggggaaacacttatgtttaccggtttattataaaaagtacagataaagaaatgcgtaagggcactgggcttccataccctctctgggggcgccaccctccaggtgtgttcaactatctggaagctctctgaacccagtcctcctgcgttttttttttttttttttaaagacagaatctcactctgtcccccaggctggagtgcagtggtgcaatctcgcctcactgtaacctctgcctcccgggtttgagcaattctccagcctcagcctcctgagtagctgggattataggcccccaccactaaacccagctaattttttttgtatttttagtagagatggggtttcaccacgatggccaggctggtctcaaactcctaaacttgtgatttgctcgcccccagcctcccaaaatgctgggattacaggcgtgagccaccgcgcctggccctcctgggtttttataaaagcttcatataggaaaccttacttcccttccccggggtatagggccaacaccctctctctagagaggatctcaagacctacaatcagaaagctgggtaaagatcagaatcttgccttgggacacgtgtaaggagagcaggagaagatcagagattattttctgagacctaacgtaccctatattataacaaaacacggtaatggggttatgggtgttatgagccaggaaccgtggtggatgaaaaccagtatgtatcacaacaccacaagaggacacgcagatatgtccatttataaattatttcagaagcatgccaagtctttgtatctaaatgacataaaacgttattttgatcccctaataatacatttttatgctctaccgaaactactcagaaataatttcccacaataggaaatatatttctttcactattcttgagtaacagaatatttaaactatgttctcaagtttttcgaagccatttcccaggatcaagg

SEQ ID NO: 2610 - DNA, 400 bp, Homo sapiens
  misc_feature (1)..(400): DMR20:51027301
tttttaacccatctcctccttgagatgaaaaggcttggatttggttggagttgggaggaatctgttgagagtggtgggtggggtgggattttcttggtttggagttagctctttggacaggggatcccactgggtgtctgtggggtgaaggctggtgtttgagtcaaggcagggattgggatgggggcattctccttctctctctccacagacactctgccccaggcactttccctttctgttcctctgattccccaaatcctgtcaccttcccgcagatttccatatagccacttcctgcaggtctcagcccattgtcaccttgggattcctggtctgggatggggttaggttgcagtaggtgaggttgaggcatgcaagggtgtgactttattgaagt

SEQ ID NO: 2611 - DNA, 2200 bp, Homo sapiens
  misc_feature (1)..(2200): DMR20:52529701
tttagaactttggactagatattttctgaaagccctgaccggatctgcagttttgtaattttagggaaatctcttttttgtctgattttctacactgtaatcctgaaaaatgatttacaaaacccaaatagattttggcatgaactaagcttaaattaactgctctctatcgtgaattaatattaagcagagcttggcagacactaaatatttgttttaggaatacacacagcttccactttcatctgggttaagcgctaatctttggcctgtcagttgcaggatatagcactggataaatcatgctctcttgaacagatagatgccagggtggttgtatacaaatggaacaatgtgtcaatgaacacccgagtttgggttacatctactataaacatcgacattcctttgcagtgagcccatttgctggttaagcagttacagcttcgcaaggtttgatgcgcctgtgcccaatcacggtgtaatgatttcagatgtttgcaattaatgaaccattagattaattggcagagtatcataagaaaggtgttaagaattgggtcaaaaccacagacaagctatcacccacagggacagcaatcaccagaggcaaaaaggtgagaaaatgaattaatgattttatttaccgcttctcacccctccctccacacactttctttctctgtaaaacattagcattgaccagcgtctaagttcgccaaacacagaaaggaaggagaaagctgaaaggaaaaagaaaatatgttttcatattcctacagttaagacttgatctttggaaagctgggagttccattggtaccaaaaagtgacaccatttctcagtgtatgtccaaatctctctctgtgggcttttttcctaagctcttatgttttattaattatgtaacacatcaaccatcttagaaaaatgattaatagtacttcagaaacatggaaataaataagccaagcttcaatatatgattatgtaggcttgatataaaccccagggtagccatcttttaagatgtgaggagtttaacaccaagctgtcgctacagtacttaaaatctggcagcatagtgagttattgcctggcagtggatggtgcttcagatgaatatgtaatttggaaagttaaattaaccctgaaatattttatttgttgtctattttccactcaggaaagagatcttcatgtaaacagagtccctcttattggctgaagtgaagagtcattctgaggtgagctaagcccagatacttggtaaatttatggtggctgttattttcataacaaagaaagtcaatttttggaaaaggatactaccatgacacacacaaaaaataattttcaaataaaatcctggtgcttcctccatagtgtgtgttgttaccggatattttgtttggcatttatttacttataggttcatttctgtctccccactacgatgtaagctccaggggaccagaaacttggtcatttagtttatggttctacccccactgactaagatcctggcacacagcaggtgctcaataaatacttgttgagtgaatgcagaaatgagttgttgttgtcaaaagaaaatggctttggaattctgtgttgtcctgggggaatactgatgggtccaggcagtgaccttactgctcttggacaggctcatttattggtttattcaaccaatctttattgaagacctactatgtgccaggccctgtcctaggcactgcagattcagcagttaacaacgcatagttccctaacctcacagaacttactttcttatgaggaaagcagaaatcaaacacatgcttacacaaaggatcaatttcattaaaacttggttactctcttgaagaaaaaagtatagagccataagaatatgtgatatgggagcctcatctagcttggggagactaggaagccttcccagggaaagtcacacttaacctgagaccttagagattaataggagagtatctggagcagagggaaagcatgtgcaaaggtcctggggaaggagcagcttcatgtttgaaatacagcaagcaaccagtgtggctgcagaagagagagtggggaggacagtgagaagcaagatgcaaagaaagtttcaggtcacagatcccattactgggtatatacccaaaggattataaatcatgctactataaagacacatgcaca

SEQ ID NO: 2612 - DNA, 1500 bp, Homo sapiens
  misc_feature (1)..(1500): DMR20:52799801
ttctttcacctgttctcatatttttaattttattttcaggtgagaatgagtctaccacatcttcacatatgtgctcctattttttggtttatttatgatccatggtgtaccccagtcctccaagctctagcattaatacttgaaattgagacaaccaaccaaccaaacacaaaaactctttttttttctctctcaacaaagcttggctcttgaaaatcaaaggcactttggctttcagggtattaattgttctacatgttcaataaattgtaaaaattttttgtcctactctgtatctaacttcccctcatgggggttatagaaatgtggtaaaaagcattggaaacctatagatttcaatatctacagttttctcccactgcaagatctgtaatttaaccttgattccactgcattgtcatcctttgtttacccttcacaccttacctgggagctcctctgggagcatttctttcatcatctcaggagcaaccctcttggtgacacaacttaaacactcaatttatcaataaacaaatatttgttgagcaccactgtgtgtaagacaccggactaggcattgagggtgggcactgatcaatatagtcgtaatttcgatggagcttgcaagctaaccaggaaggtgagtattcaataaatcataataaaattaatgtattaaatgtaattgtgatcattgttctttatcatatattcctccttctggttgtgaagacatatcatgggggttcctatttattttctgaggaagggacacttgagcagagatgagaagtaagtaaaagttaagtaggtaagcgatagtcaaatggagttgaaatggggagcatttaattagggaacacggcagaagattctgaggaaggaagaaatttagcttattcaaatcactagagaagatccattgggctgggggacaaagaaagagagagggtgatctgcatgatgaattgatgaatagacagggaccagaccaggcattttcatgtttgttgaatgaatgaataaataaatgagcttggagcaacctgaaactttgacttctgctctagattaaaaactaccattgcctggagtctgtagttatgtgacattgactcatgcaattgtgcatggtgtaatcataaaacaaaccagagacaaggcttaaggcaacattgaaggaagtgtcctgaactttaaatgcaaatcaaactagtagcacctcttctacagtgacacctttagaaccaagccgttacagaagcatttctccctcaccccttctacttggtggtttccagttgagtgaagaaatcattgagaagtaaaccgttccaacatcgtgtgtccaaagtcaaaggatagccaggcatctgctgaaaatggaatattgactcaagccccagatggggaatatttgaaaagcactctgaccagttcttagcagtggcagttggaacagaaggaaaatcagggatatgcaggcatcctcaacca

SEQ ID NO: 2613 - DNA, 3600 bp, Homo sapiens
  misc_feature (1)..(3600): DMR20:53152001
tcgagggcaaggttgctgtaaaatgggaagcatcatctggtccaaggttgacaaactctgatttctgccagagccacgcaggtaccatgtactaaaatcctaagatatacatttttcacattacaacatccctgaagttaggatgcatcctccattcttcattgtacaatagtttgattggcaacatttttttttcactttcttgactgtgaaagtaaaaaagcattaaggagcttagatccaatccactgcagtctcagaggtgagccagggaactcaggtgacttaggagcttacacagtttctacacagggctcactggggctaacccaaattctgaccctgaccctcaccctaactttaaccctgaccttcaccctaatcttgaccctaaccctgactctcagcctaaccctgacctttatcctgaccctgagcttgacccttattctaaccctgaccctaatcctgaccctgattctgaatggctgaatggctgttgctctactggttgttgccacacagaaacacagaccaggggtggccaatcagatcttttgagagaagctagaaattcagccatgcagtctcacaagatttaactgttgtcatttattaaccctatgtaggacaaccaagacaggtcaggtatctagattggatctggccctccaacacctagaaagatttaatgagttgattgaccaatatcactctgctgaaatatgaaattatgtctgacacctatggttttattttttgtctgattggaatgacaggtgaaatgataaaagcataagcccagaaactcagggaactacagcagagagggagagatattcaagtaaacataattacatttataacatggtgtgatgctaccaggggctttgaggacccagagaagaattgcctaccccagtcctgtgcaggcaggaaagaacactcagagaaagtgttcaaagctgacagaggaatgagtagagggtggtgtgggagagaggttgatagggatattccagggaaagggagcagcatgtgcccaggtccagaatccatcatgcctcagaatgccttttcaaaaatgaaatcacccataacacaatcaggacatcctatgcagccgcatggaaccaaaatcagctgacctattaggaagttgataagagagaaaagaatatctgctgtgaccatagcccctgacacatcctatagctctgtagcgaggcaagcataaatgtccccagcctgggattctatcagagctcaaagagcaggactgttcctgcagtgtggccaaagcaggcagtggcctagagagtgctaggcaagaggtccctgtcaccaggtattacttcaaaagttgcatgtgccaccctgtccctctcctgcttggtcaaggctgtagatgaccacatcaaattgtatattgggatgttacagttcttggactgcaagcaggatcaactgacttggtaacttaaacaaaaaggaaattccttgcagggttaccagtaactcacagaatggatgtgaaaggtggaggactaatcttagaaatggttcaatgtcagaacagaccctgagtctagaaagtagaaactgcagaccagtttgttgaggtcccaccactggactaaatgaattgctcttcaaatttcctcattttcttgtcttctatggtcaagatgcaaatttcatgaaaagagtgtccagtttgcccaactggagccattagcttttgctgcattaaaaaaccattccaaaactcagcagcttaaaacagggaccacttatttagtccgtggtcctgcaggtcaataattttggctagactcagctgatgactggctggtcttgcgtggccttagataagatggttcagctcctctcataaggtctctcatcctccagcaggctaacctaggcttgttcccatggtggtagcagagttgtaagagcaaaagcctgtaagtccttgtgatctagtctcagaactgtactgtgcttacttctattgcattccattggacaaagtaagtcaaaaggccagcccaacttaagcaatggaaaaataaatgctatcttttaacagacagagcttcgcagtcacatggcaaaatgtgtgcatacaaacaaggccaatttaccagcaatcagtcatactggctaggggactagaacaggggacttgaaaaagagctttatcaggctacatctaatggggagtaagtagcaactcccccaaaactttagttttgttaggaaaggggaatgacctaagtgaccaaaaaaaatttttttaagaagtaaatgtttttttaacattgctcctatgtatgattcattagaaataagtgtcttttcccatgaacaaaatttgtttcagcagtaaaataaaaataacaaataataaaattaggtctcccagcttctcgtcaacttcctggcatagcaagaactgtgaccttccatgcacaaccactgcgggtgccctctcttgcccagttgaaggatccaaacagtgtggcccagagatttttgattcaaaaatcaatttctgaaatatatgatgaagttcatcaatacttttctttctggactactccagccctcattgaccactcctgtctttgaaatctgaatgcactgaaatctagaggtaactatgagagctgggcttgagtcacacacttcccgtatgattctgagtcagtgaacatctctaaaacctcaaggttcttatctataaagtgagtatagaagtgtagctccctccaaattttgtgagctgtcactgagacaatctatataaagcacatagcatagtatctcccgaataatcagcaaccaaaaactatcctttgcttatgccatcatcattatcattattgacatgcatttaattagttcttctgccccactagaaattatgacatctaaatattaccttctgtataaaagatgcctgtcacctcgatgtaagttgaaaaaaaaatagttaatatgtgtgagacttttgtttcttctaagacaggtgtttgaatatgcatttttttttttttttttttttttagttttgtcaggaactacataaaggttaatctctttttctggcaaatatttcctgagtgcttccatgaggactgcgtgggtagctcacctgtgattctgatccggaactggaccctccctatgaagtattattgtatcaattgtttgaccaggcagggaacacctgacctaccccagtaggtaataggggaagagtttaataaaaagacaatgaaaaggtaggagtggtgtttaagaaaccaagaagggatagttcagtgacctgagactggtgtcagaaaggaacctttggtagacgaacataggactcatggtaacctggtcaaaaggaacccgtgggatatatattcccgcctttcctcctcccacctgcccatcccctttgggcaaactccaggggtagccagaggacagaggatctcattgaggggatatatcagggacagtctcccagggcacaggtctgggaaggagggtgcagaattaatgtacagggcaagcagaagatacccgggacagatcact

SEQ ID NO: 2614 - DNA, 1200 bp, Homo sapiens
  misc_feature (1)..(1200): DMR20:54081601
ttcaaagggacacttgtttcttagtttatgttggtttccgtcactccctccccgctggccccacatccattgcctatttatcctcaccctcgtgctgccatttttcttggagcaaatttataagaaccatgaactatttctaccaaaatatgaaaaaagaacactataagagatcccatgtcttcataagaatgcaaaagcatccttgtaaatgaaaagttacatatatttcacagaagtttgatgtatttaatataacataattataatatttaatataaacgtagttgcatatgcttaaaatacaaagtatgtctgtgttgaaaacaagtataattttttcatccaatacatactatgctcttagctggagagtttatgccctgatatttatcacatagcataggaagacccccatctctacaaatattgaaaaaaaaatttagccaggcatggtgctgcgtgcctatggttccagctactcgggaggctgaggctgggggtttgcatgaacccaggagctcgaggctgcagtgagccatgattgcaccattgcactccagcctaggcaacaaagcaagactctgtttaaaaaatatatatagatgattaattcccactttgaacaaacatacttcctgagtcttcctgacccctgcagacacttgagtttgtgagccctgacctggctgctaagcggtgtccgttggttttcctgttgcgcccggggtagaagtttgaagctgagcttcaagtgtttgtctttcccttgggagaaggagattttctagctcacctcacatagtgtgtagacatctgggttatcctcgcttctctagagaactatagctgagaaaatgagaagccatctctgaggagtaataacacacagtgctctgagaggttgaaacagaaactgaggaaaaaaaaccaagtttttcaaaggtggatttaaacatgatcagttttgccatatctgtgttttctctctcctactgcagggcttcccaaactttagttatacactgaagctttttttctcattcctcatgccatataaacgaaaacatattttctttaaattgactcacgatttcatttgaagtatctaaaatagacactgactatgactaccataagtggaaaattagtattatgtcccccaaataaaatgtaacattaaaaaataaacctgtaaca

SEQ ID NO: 2615 - DNA, 200 bp, Homo sapiens
  misc_feature (1)..(200): DMR20:54465601
agtataattctgtttctatagcaatctaaaatatgcaaaaatgatttatagtgacagaaagcagattggtggttgcttagggactggaatctggtgagatggagaaagagactaaaaaggggcatgagaaaactttggaaagtgagggatatgttcattatcttgattatggtggtgatttcacaggtatatatatatat

SEQ ID NO: 2616 - DNA, 1700 bp, Homo sapiens
  misc_feature (1)..(1700): DMR20:56802801
gagggggtcaaggctgcaccccatcagtgggctcgggggctgtagtctccttggcgacaagtcctttgccctgacaacgtccacctcccggggatgttccccacggcagctttttgagttgagtgctgacaactccgatttgccagcgaagggggaaaaaatcaaaaatgattcatccgcctgctcagcgtagtgggaaagggactgacggggccttcagccgctcggcatctcaccgtggcagagggaaatgctaacaggagcagacaaccacggtggaactgggggttgggggcacaggagcaggagaacggaacacgagaggatctgagaggggcacgccaagtgggttcaggcaagagaccccgagaggctcgtttcgccaaagcatcaccttgggagccccgcacctgcctcgtctgggccagtgctccccgaggttggtggtcctatgagagctgccgttcttaggctgggactggtagccccaatgtaatttggtacccaggtggacatttttattacaaaaatgcatagtagtgaaaacacaactagcatccaaaaattatgctttcaggtgctattttttttttagtagaaataacgacaatccttacccgggaagcagtcattattgctggccaggccatgttccaagtgataagcacaagcctctgtttttatggatgggcgaatgcatacaggtctaagactccagtggttggccgggcatggtggctcacgcctgtaatcccagcactttgggaggccgaggtgggcggatcacttgagctcaggagttggagaccagcctggctaacatggcgaaatcccatctctacaaaaaatacaaaaattagctgggcctggtggtgcacgcctgtaatctcagctacttaggaggctgagacactcgagaatcacttgaacccgggaggtggaggttgcagtgagccgagatcgcgccactgcactccagcctgtgtgacagagcaagactccttctcaaaaagaaaagaaaaaaaaagactctaaagagtcccatgaaaagttaccaacattcccatgttacagatgagaaagccaccgatgccaaagaaattacatcaatttctccacactcatcgtcccaggtgttgatttgttgatttttataaaccaatcataaccagttcagccttttttttttttttttttttttgagacggagtctcgctctatcgcccaggctggagtgcggtggcacgatctcggctcacggcaaactccgcctcccgggttcgcgccattctcctgcctcaccctcctgagtagctgggactacaggcgccgccaccacgcccggctgatgttttgtattcttagtagagatggggtttcaccgtgttagccaggacggtcttgatctcctgacctcgtgatccgcccgcctcggccttccaagatggtctcgatctcctgacctcgtgatctgcccaccttggccttccaggatggtctcgatctcctgacctcatgatccgcccccgcctcggcctcccaaagtgctgggattacaggcgagagccaccgcgcccggccagttcagccttcttctccctccacacgccatccggggggtgctcagtggagacctgttgactcacagctctgtcaactcatgagccccgtgtgtttcccgtcctttttcttgggccgac

SEQ ID NO: 2617 - DNA, 900 bp, Homo sapiens
  misc_feature (1)..(900): DMR20:58690001
gagcctcgtggcaatcagctgagtctaagcaggcattaggttttataggggtgaagtctgacatgaaattaacatataaatgtagatttcaaacacctagagccatcttacaagataggatttcagaaatgtgtcctagaatgtgaactgtaccaaaaaacatcctagtaagttctaggagctttattctgatttgtcccagaagtttttaatcttttcttcaactttggagcaaagtctgaacatccaattgaatgtggaataggtttcaagccatcaaaaacataagttgatttttgggttgcattaaagatctggtaatttgttttaaactttcattttttaaggaaaattaaatagagttgaatttttcattgacagtgaaatatatagtaagccatggattaataccttcataaaaatttatctaaacaaagtgctgcctgtcttatttatgttaaagtctgtaaagtcagcagtgaaaaagggaaagtactttcctggaatgtatttgtatctgtcacaagctgaatcttgaggaaattggcaggcatttgaagtggaataattccttagcgttctgtttagtttggatttcttcaattcgggggtggcttaaaaccagaatcaccaatatttgcttttaacaagcatctaacgttttctcttgctttgtgtacactaagtgctcaacaaatgttggttgaattgaatcattttgttcatcctttctggggactgtcagggttattcagtctattcttaaatatgaaagaattctaaaagaaaaacatctccaaaatgacctctccaccaacagtttatctcatttccaactccttgtacacaaacctgctagatctggctttctgaaatgcttcttggatccctcttcagttt

SEQ ID NO: 2618 - DNA, 800 bp, Homo sapiens
  misc_feature (1)..(800): DMR20:59715801
gaaaaaaaatgttaaaggtagaagcagaggtgcctgtccatattttctcctagtgggaatgattcatttgtatatttatttattcagcaaaaaatatcctaaatgtttgtagcacaccagacactgcagcagttaaggatacagcagaagtgaaacacacatgcctgccttctaggagttcacattctggaccaaggagtgttttctattccagtttgagagtgtgtgtccatgcacctggctgtgagctctgggtccctgtgtgctggccctgcccctcctctggctcatggtgctcactccactccagggctccaccccatgttttcagtctccacccagacattgcttcgggaccttcagcaatgaggttccctgcccctgctttgctcttcccttcaccctttgtgtgtgtgtgtgtgtgtgtgtgtgtgtgtgtgtgtgtgtgtgtgtgtgtgtgtgttgtgacagagtctcgttctgttgcccaggctggagtgcagtggtgcgatctcgatctcagctcactgcaacctctgcctcccaggttcaagcgattcttgtgcctcagcctcccaagaagctggaattataggtgtgtgccaccatacctgtctaattttcatatttttactagagacggggtttcaccatgttgcccaggctggtcttgaactcccaacctcagatgattcacacacctcagccacccagattacaggcatgatccactgcacccggccctcttcactcttcaactgagagtcctgctcattattaatgtcactttttttagagag

SEQ ID NO: 2619 - DNA, 300 bp, Homo sapiens
  misc_feature (1)..(300): DMR20:60522301
tacaatcatatcagaaagaataaaatgcttagaaataaaactaggagataaaagacttgtacaataaaaactacaaaacattactgaaagaaactaaagaagacataaaaggaaatgcatcctattatcatgaattagatcctcacgcagagagcctttaaggaaatgaatgagatcccatctacctactcgtgttctttttggctctgctattcattcttgaaacccaaggtaacagcttgcttcaataatttgtggtttggtgtgagctggcttccttgtcccacagctgggcatttg

SEQ ID NO: 2620 - DNA, 700 bp, Homo sapiens
  misc_feature (1)..(700): DMR20:60610501
tcacccaggctggatggagtgcagtggcacgatctcggctcactgcaaacttctcctcctggattcaagcgattctcatgcctcagcctcctgagtagctgggactacaggcgcccgtcaccaagcccgggtaatttttgtatttttagtagagatgggggtttctgttggccaggctggtctcaaactcctgacctcagttcatctgcccgccaaggcctcccaaagtgctaggattacaggcatgagccaccacgcccggccgagtaaaagtttcttaacccaaccttggagcatgtttcaatggcctggaatggggatgttaaaaagatatttttaaaattaaaatcccaggagatttcatttttctgtcagggtcagaatcactgtggcctacagcagtggttctcaaacttggctgcacattggactcactcagcaagttacgaaacgtggtgatgccaggttctcaccttgagagatgcagacgtcattggccaccagggtcacctgcgcatcagcgtttttgcagactgagaagcagttcgaacgtgcagtccagtggaagaatccctgccctacaccaaagctccatacagcattattgcacagagcaggggattgatcaaatggactttctcgctttgctttactcagcgcctcctcttctgcctgtcatagggacctcgtggggtcttga

SEQ ID NO: 2621 - DNA, 2200 bp, Homo sapiens
  misc_feature (1)..(2200): DMR20:61034401
tttatacattataggattcaatttgctaatattttcctgaggattattgcgtttaagttcataagagatgttggcctgtagtttttctttcttacaatgtcttcatctggtttgggcattaggataatgcgggccatataaaatgagttgggaagtgttctttctgcttctgggagaaattatggagaattggtatgattttgtcattaaatgtttagtagaattcatcagtaaaccaatcttggactaatgcttacagttttggaaggttattaattatctattcaaattattttataaatgtaggcccatttatattatcaaattatccttgtgtgagttttgacagtttgtatcttccaaggaattgaatggtcatttcatccaagttatcaaatttccaggcatagagttgtggtgatatttctataatccttttaatgtccatgagatcagtaatgatgcctcttctctcatttctgatgtaagtgatttgtgacttctctatatttatcttggttaacctggcaagatgactatccattttattaatcttttctaagaaacagctttgggttttgattttctctattagtttcctgttttaaatgttattgatatatgctttaatgtttattatttttctactgcttgctgtaggcttaagttgttcttgtttctctttttctgaagaagcagcttatattattgatgttttgtttattttctaatatatgcatttactgctacaaatttccctctaagcactgtcttctttgtatgtcacaaattgtgatgctatatttgtatacttctgtttaaaatgttttttttaatttaacttgagatgtattctttgacccacgtgttattttaaaatgtattatttcatctccaagtatttgggtgttttctgactgtctttctgatattgattcgtagtttaattccgttgtagtctaatgacacactttgtgtgatttctgacattttaaattggttagcgtttgttttatggctcataatgtggtctgtcttggtgaatggtccccactagcttgagaagaaggtgtagtctacagttattggatggagaatttcttaaatatcaattagatcaaattgattgatggtgctattcagttgaacttcagttaatccttaatgattttctgcctgtttaacctatcaattaccaataaagaggtgttgaaatctctaattataatagtagatttgtctatttcttcttgcagttctaccagcttcctgccctacctattttgaggctctcttgttaagtgtgtagacctttagggttgctatgtcttcttggaacatgggtctttttgtcattacacaataccaccctttatccctgataattttccttttttccttcttctgatgtctgctttgcctggaagtaacacagctatgccagttttcctttgagctttagcatgttatatctttcttaatcctttacttttaacctgtctgaatcattacatttaaagtaggtttcttacagaaaaaatatagttgggccttcatatttcttaatctattctgatagtctctgttctttaattggtgcatttagacaattcatatttaaaatgattattaatatatttgaattaatgtctaccacatttgcaactcttttctattctatacattcatcctttattctctccctatattttttggtctttgctggttttaactgagcatttaatatgatcacattacatctcctttcttagtatgtaattgtacttctttataatatttttaatgactaccctagtatttcaactgacatacatttttaactatctaagtccaccttaaaataacagtatactaggccgggcgcggtggttcacgcctgtaatcccagcactttgggaggccaaggtcagcggatcacaagctcaggagttcaagaccagcctggccaatatggtgaaaccccgtctatactaaaaatacaaaaaaaattaggtgggtgtggtggcactcacttgtagtcccagctactcggaaggctgaggcagaagaattccttaaacctgggaggcgaaggttgcagtgagccaagatcgtgccactgcactccagccagggtgacagagtgagactctgtctcaataaataaataaataaataaataaataaataaataaataac

SEQ ID NO: 2622 - DNA, 200 bp, Homo sapiens
  misc_feature (1)..(200): DMR20:61054401
tgtgagagggagcccttcttcatcccgggacatcacgggacgtggcacttgatgaagaaagctgggctagccctgaggtccactccaagcacagcctcagagtcaggcagccgtgctagggaccatgcttcccccagtgactgacggggtcctatgacctcctcagcctcagaggcccactgcagagagtagagacagcc

SEQ ID NO: 2623 - DNA, 1500 bp, Homo sapiens
  misc_feature (1)..(1500): DMR20:61964901
caggcactggtggctgtgcttcaagctgctgtggtggaggctgagccagtttcccacccacctgcctaccaggaagccccgagtctgtccctgcagtccctcctcctgggagctgctgccgaatctagggtgtccccgcctgttttgctttctgggaagagtctcctctctgagaagcaagatcccctggagatgcggtcggtgctggctccgcctgccctgccctgcctgcacaccgttccgggtgtcaccaccccaggcgactgcaggaccctagatgccctgaggtccgggaaggcggggggtccccgagtcttttactccctggagataagccttcgcggggttcgcaggactgcgtcctcctgggcccctttttccttttttcttctacctgggggttgtggtgccaaatgcctcttgggttccaacgtctggtgccctctcaggagttccaccggcaacgacccgacgtgcagggactgtggcaggtttgtgacccctcccctccccgcagagcctggcacatcggcagccctcccgcgagtcagcctgggtgactgcgactgccctgggctctaaaccccggggtacgggccaggtgtctgcttggggaggtgtagacggacacaggcagggtgggaggaggcgaaggtgtcctccacgaaggacgcggggcgcaccgggactccagtccccggcaccctccacccggcacccgcgtccccacacgggccgcgtcccgcctccccagcctccctggcccccccggccgcccccactcacatcccgttgccccccacctggcccccaccatgcacccagcatcccaggcccaggtgccccgccccgggccttacccacgggctcgagcctgatctcctccccgggccccccgcccctggctcctcctcggctcccacaaggcacagcctgtgtccgccccagacccgccgcgaactcgcgctgccacctgccgcctcggccctgcccccggccccgcccccagccctctagccccgaccccgaccctccggccccgcccctcccctggcctgccacgtgtcccctaccccgcagggcagctgcgtgttttgtgttcctgtctctgcggccaggtgggggcgagtgcgctgaggtcaaccctcggccacccgggcgctgggtggtgctgccactgtccccatttcagagatgaggagactgaggctcacaggggaaagggccatctgcatccggaggagggcctaagccagactctccctggaggaacagggaggcctcgactagcccctccccaaacgcagcaagtgggtgctctgaggagggggtgtggggacccttccctctggggccctcagaaggggtgggcctcagccccaccatgtggccccaatccagccctcaggacccgccaggagtctcagcacctccccacacaccgagtgtccaaaagcctctgacatcccctctagggggagcgctccccaaagtctctct

SEQ ID NO: 2624 - DNA, 1500 bp, Homo sapiens
  misc_feature (1)..(1500): DMR20:62445201
tgctgtggttacaggcatgagccacggcgcctgggctcctaaactgatttttaatgacacgagtaatacaggaacacattctccttctaaacagaattctaacggcgggggccctcgagccgcggcatcatcccagcacccccagcctcaccgcgagggccctcgagctgtggcatcatcccagcgcccccagcttcaccgcgaggtggctgaggttcccagcaggacatctgtccttctggcctgagagtccgctgttgggtgccggtctcacctggcagcaggtttctccatggagcagtgagacaggaggtttcctcagcagatcacccagaaacggggctctgccatggagcccccggactgatgggcttggggggctttcattctccgcagtgacaggcagggccgtgggatcctgctccacgcctcttctactcacgccttacgctgagctgcccaggacactcccagggctgttttacccacacgaggcacagagaaggtagtggcctgctcaaggccacacagcgaggctgcgtagagctgctgcttgagccagcgtggcctggcctgggctccaaacggcctgcacctgcccttccctgaggacggtgttagatgtaggcacgccactcacccatccaggtctcacctcctggtgtttggaggaccctaggtggggtggggcccgggggtctgtgttcacactgcccagcagcaggggaggcacacagtgggctctggactgtgggcacttgccagctatacttggggacagagtgggtcctcctcggcaccctccatcatgtattcacacacgggtcattcgctcgttcacacgctggctcctctgcccagcatgtgccatttgctcagctcagcgtgggcggcagaggggcacaggtggcgagggcagggcgggggccgggggccacaggtggtgagggcagggcagggcggcagaggggcacaggtggcgagggcggggcgggggcggcagaggggcacaggtgctgagggcagggcgggggcggcagaggggcacaggtggcgagggcggggtgggggcggcagaggggcacaggtggtgagggcggggtgggggcggcagaggggcacaggtggtgagggcagggcgggggcccggggcctgctctccagagccacacaaacctggccagatggctcctgactgggacctcccagggcacatcctcctgtccctccttctctgtgctcgctgccaaccaccacccaaagcagcagccccaggagggaccagggccccctcttatcagcagcctcccccaggcctggccgcagcgttctccctggaaaacctgagtctccactccctgctgctggctcccaccaggccccttcctcaccaggggcatcagcagacgcctccgcctggcagcagacaccggcacgaccctcaccccgcctgggtggccaagctgctctggggagctggctggaagactacgtggaaac

SEQ ID NO: 2625 - DNA, 300 bp, Homo sapiens
  misc_feature (1)..(300): DMR20:63017901
ggttccctctctgtggcccttagccctggccacagcactcggaacttctaaccgagccctgccgccatagcacacggtccgtggtgcagtcacctgacactgcaccagggcgtgatgtccacaggcaggccatgccccggctccacacagcggccccggactggagtgccccccgcagagacagcgggcaggaggccgtccttcggggccaccactgtgaccatgagatgcccagccctagagggtcaagggtccgtctgagctgcccgagaggtcctctgggctgagcagggagtgcac

SEQ ID NO: 2626 - DNA, 1800 bp, Homo sapiens
  misc_feature (1)..(1800): DMR20:63761401
atataactagagctgtaagtttcccttaaatattgctttagatgtgggcctaaaagttttgatacagcattttttcattatcattcagttaaaaatattttggccaggcacggtggctcacacctgtaatcccagcagtttgggagtccgaggcaggtggatcacaaggtcaggagttcgagaccagcctggccaatatagtggaactctgtctctactaaaaatacaaaaattatccaggcgtggtggccggtgcctgtaatcccagctactcgggaggctgcagcaggagaatcacttgaaccccggaggcagaggttgcagtgagcagacatcgcaccactgcactccagcctgggtgacagagcgagactctgcctcaaaaaaaaaaaaaaaagtttatcatttccatagggatttattctttgacttgagggttgtgtaaacgtatactatttgatttgcaagcatttggggatattctagtgtcttcttgttactgatttctaattccagtttgctaaggtcagagaatatactctctgatttcaatcctttgatatttgttgaacctgaattatggccctggttggtctattttggtaaatgtttcctgtccatttggaatatcctgcacttttggtgtaacgttcaaactgggctaattgtgctgttacagccagtatctctatgaacacagatgcaagactcaaaccaaacattagctaactgaatccaataatacagaaaaagaatagcagcttgtgaccagatgtgtttatttccaggaattcaaggtgaatttaacatttgaaaactgtgttcaaatattctctatccttactgagattttgtttgctgttctatcaattactgagataagtgttttaaaacccccaattgtaattgtgaagttatctctttttttagttctgccagcttttacctcatgtattttaaaactgagctgttgccgggcacagtagctcacacctgtaatcccagcactttgggaggccgaggtgggtggatcacgaggtcaggagatcgagaccatcttggccaacatggtgaaatcctgtctctactaaaaatacacaaaaaatgagccagggtggtggcacgcgcctgtactgccagctacttgggaggctgaggcaggataattgcttgaacctgggagacagaggttgcagtgagccgagatcgcgccactgcactccagcctgggcaacagtgagacttctctcaaaaaacaaacaaacaaacaaacaaacaaaaaaaaaaccaactgagctgttaggagcaatatgcattaggattgttatatttactactgaattgactaattatcattatgccagtccctcttgagtaatacttctcaaagtttactttgatattaagattgctatactgactttctttttggttagtgtttgcttgattcatctttttcttttctttttttcttttgtagagatagggtgttgctccgttacccacgctggagtacagtggcacaatcatagcacatggtaacctcaaacttttgggctcaagtcatctcctgcctcagcctcccaagtagcttgaatcactggtgagcaccaccaaacccagctaattatttaattcttttagagatggggtcttgctaagttgcccaggcaggtctcaaactcttggccccaagtgatcctcccaccttagcctcccaaattgctgggattacaggtgtgagccactgtacccagccaataaatagtttttaaaaacaggctatgtgttttgttcatt

SEQ ID NO: 2627 - DNA, 2000 bp, Homo sapiens
  misc_feature (1)..(2000): DMR20:64125901
tactacaccgtcttgattaccacagctttatactcaaatactacaccgtcttgattaccacagctttatactcaaataccacactgtcttgattactatagctttatactcaaatactacactgtctgattactacagctttatactcaaataccacactgtcttgattaccacagctttatactcaaatactacactgtcttgattactatagctttatactcaaatactacactgtctgattactacagctttatactcaaataccacactatcttgattactacagctttatactcaaatactacactgtctgattactacagctttatactcaaataccacaccgtcttgattaccacagctttatactcaaatactacactgtcttgattactacagctttatactcaaataccacaccgtcttgattaccacagctgtatactcaaatactacaccgtcttgattaccacagctttatactcaaatactacaccgtcttgattaccacagctttatactcaaataacacactgtcttgattactatagctttatactcaaatactacactgtctgattactacagctttatactcaaataccacactgtcttgattaccacagctttatactcaaatactacactgtctgattactacagctttatactcaaataccacactgtcttgattaccacagctttatactcaaatactacactgtcttgattaccacagctttatactcaaataccacaccgtcttgattaccacagctgtatactcaaataccacactgtcttgattaccacagctgtatactcaaataccacactgtcttgattaccacagctttatactcaaataccacactgtcttgattactatagctttatactcaaataccacactgtcttgattaccacagctttatacgcaaataccacactgtcttgattactatagctttatactcaaataccacactgtcttgattactacagctttatactcaaataccacactgtcttgattactacagctttatactcaaatactacactgtcttgattaacacagctttatactcaaatactacactgtcttgattaccacagctttatactcaaatactacactgtcttgattactatagctttatactcaaataccacactgtcttgattactatagctttatactcaaatactacactgtcttgattaccacagctttatactcaaatactacactgtcttgattactatagctttatactcaaataccacactgtcttgattaccacagctttatactcaaataccacactgtcttgattaccacagctttatactcaaataccacactgtcttgattaccacagctttatactcaaataccacactgtcttgattactatagctttatactcaaataccacactgtcttgattactacagctttatactcaaataccacactgtcttgattaacacagctttatactcaaatactacactgtcttgattaccacagctttatactcaaatactacactgtcttgattactatagctttatactcaaataccacactgtcttgattactatagctttatactcaaatactacactgtcttgattaccacagctttatactcaaatactacactgtcttgattactatagctttgtactcaaataccacactgtcttgattaccacagctttatactcaaataccacactgtcttgattaccacagctttatactcaaataccacactgtcttgattactatagctttatactcaaataccacactgtcttgattactacagctttatactcaaataccacactgtcttgattactacagctttatactcaaatactacactgtcttgattaacacagctttatactcaaatactacactgtcttgattaccacagctttatactcaaatactacactgtcttgattactatagcttt

SEQ ID NO: 2628 - DNA, 2700 bp, Homo sapiens
  misc_feature (1)..(2700): DMR20:64131901
tctcatggcctatagagaccccctcactgtccaccctcatggcctgtagagaccccctcactgtccaccctcatgtcctatagagaccccctcactgtccaccctcatgtcctatagagaccccctcactgtccaccctcatggcctgtagagaccccctcactgtccaccctcatgtcctatgagaccccctcactgtccaccctcgtgtcctatagagaccccctcactgtccaccctcatgtcctatagagaccccctcactgtccaccctcatgtcctatagagaccccctcactgtccaccctcatgtcctgtagagaccccctcactgtccaccctcatgtcctatgagaccccctcactgtccaccctcgtgtcctatagagaccccctcactgtccaccctcatgtcctatagagaccccctcactgtccaccctcatgtcctatgagaccccctcactgtccaccctcatgtcctatagagaccccctcactgtccactctcatgtcctatagagaccccctcactgtccaccctcatggcctatgagaccccctcactgtccactctcatggcctatagagaccccctcactgtccaccctcatggcctatagagaccccctcactgtccaccctcatggcctgtagagaccccctcactgtccaccctcatgtcctatagagaccccctcactgtccaccctcatggcctgtagagaccccctcactgtccaccctcatggcctatgagaccccctcactgtccaccctcatgtcctatgagaccccctcactgtccaccctcatgtcctatagagaccccctcactgtccaccctcgtgtcctatagagaccccctcactgtccaccctcatgtcctatagagaccccctcactgtccgccctcatgtcctatgagaccccctcactgtccaccctcatgtcctatagagaccccctcactgtccaccctcatggcctgtagagaccccctcactgtccgccctcatgtcctatgagaccccctcactgtccaccctcatgtcctgtagagaccccctcactgtccaccctcatgtcctatagagaccccctcactgtccaccctcatgtcctatgagaccccctcactgtccaccctcatgtcctatgagaccccctcactgtccaccctcatgtcctatgagacccctcactgtccaccctcatgtcctatgagaccccctcactgtccaccctcatgtcctatgagaccccctcactgtccactctcatgtcctatgagacccctcactgtccaccctcatgtcctatagagaccccctcactgtccaccctcatggcctgtagagaccccctcactgtcaactctcatgtcctatgagaccccctcactgtccaccctcatgtcctatagagaccccctcactgtccaccctcatgtccaaagagaccccctcactgtccaccctcatggcctgtagagaccccctcactgtccaccctcatggcctgtagagaccccctcactgtccaccctcatggcctatagagaccccctcactgtccaccctcatgtccaaagagaccccctcactgtccaccctcatggcctgtagagaccccctcactgtccaccctcatggcctgtagagaccccctcactgtccaccctcatgtcctatagagaccccctcactgtccaccctcatgtccaaagagaccccctcactgtccaccctcatggcctgtagagaccccctcactgtccacccatatggcctgtagagaccccctcactgtccaccctcatgtcctatagagaccccctcactgtccaccctcatggcctgtagagaccccctcactgtccaccctcatggcctgtagagaccccctcactgtccaccctcatggcctgtagagaccccctcactgtccaccctcatggcctgtagagaccccctcactgtccacccatatggcctgtagagaccccctcactgtccaccctcaggaccctctgcatttgctccttgggttcccggaacttgagcttgggtcttggtccacagcagctttgggaagggccctcggctgctttttgcttcagcagctggggagcagttaactttcagacccggccctcccccaaggcagctcagggaggggctggacactcggttatttatgtatttacttatttttaaatcaaagcacagcaaacatgaccatgtgggggtggcccagtggaccctcacagtgagccctgggccacacagaacatggccctggagcacccctatgaggttttaacagggttttgggggaccttggtgcttcctaaagtttcgggatgagtccccggggtctccagactgcgtctgcctcctcgtgcaccagagggtggcagtaactgttcatgtttgccccatccaggggtttttaccaggggtacctcatcctttctggggagtggggagagcacctgagggggtcggcctggaacaggaggttgcagcccattgcctgagtcttaaagtgtgcccttccccacagcacttcaggatcactctgggaccatcctaggattaggaattttaaaacgtttaaaaaaaattattttcctttttttgggggaaattggttatacatccagatgattcaaaaagtaaaagtttaaaaataaat

SEQ ID NO: 2629 - DNA, 2600 bp, Homo sapiens
  misc_feature (1)..(2600): DMR20:64156501
aggaagcccctctgcagctgcttccagttcttcctgaggcctggcctaggctgcccctgctgcagggagctgtctcctctggtgccacagcagtcacggtgactttgccttctcctgccggtgcccccagccctcagctgtctctcctctgtctttcctctgtccccacatcctttgtctcctgggctgggctgttgctgaggctgctgtgagatgcacagatccccaggacccttgggctggccccctcagaggcttgagggcctggtgacctgggtcctctgagcagcttctgtcctccaggtcactctgctgtttcagcatccccacagcccagccaaccccctaggatgccgccttccaaggtcatggccctgggtcagggcagagcaggcagaggagccgtatgggcagaccagaggggcttcataggtgcccctgtattgggtgccctactaaagcagaaaccagtgccagcctagacagcgatgaccagcagcctgtgacctctggagcccgggatgtgtccggacatatcacgtcagcccaggtggcgctgagtgctgggaacccagctatggtgggtgatgtccagacggcttcccttgggtcagctgcagcccggcttcctgttgagggcagggaggtacagtggctacacgcagccctgagggaggctgaggtattgccaccttcaatagccagagctgcatcccacacacggggctggactctcccggctgtggggtgaggctgggccgcatggcctatggcaaatgcccctcaaaccctaatgcatccacggtcaacctggtgagttctgactcagcctggccaggttcccctggagctggccccctgagcacgtgttgagttggggtgggggagctggagggcctttctcgagcagaacttcagagaggagcgctggccctgtctttcctgattctgaacgtgtccaagtcgtttcatcacgtgatggattaccaggctggttggttctaccgaaaggcagcagcacaagcttttcctggatttctcaccattgttcctttaaataatcagtcttaattaactccatccgaagaacatattttccccaagggtagggagtcccagtcaggtggagcaagttggaactgcaaactgcatttgatagctgtggtgttgggaggagccccctggctactgcgaggggtgtctccgtgatgggcgggcagatggatcagcaccaacccctgctggcactttctgacatttctgttgccctcatttgatagatcgggaaactgagtcacagaaaggtttggcaatctgccccaggtcacttcccctaagcacagacgtccttgtggacgaggagaagaggcagaactcacaggggaaaacccttcttccacacagcatctgctgtggccagctgcccccacctgcccctgtccccacctgtccctgtccccaacctgccccacctgtccccgtccccacctgctcctgtccccacctttcccatctgcccctgtccccatcctgtccccacctgccccacctgccccacccatccctgtgcccaacctgccccacctgcccctgtccccacctgttcctgtccctacctgccccacttgtccctgtcctcacctgccccacctacccctgcccccacctgcccctgtccctgcctatccttgtcctgcccacctgttcatgtcctcacctgttcctgtcccccacctgcccctgtcctcacctgccccacctgctccatcccacctgtccctgtccccacctgtctttgtctccacctgccccatccccacctgccccacctgcccctgtcctcacctgtcccacctgcccctgtccccacctgcccaacctgtctgtgtcccccacctgcccctctggtccctgccaccacctgccccacctacccctttcccctacctgccccacatgccccacctgtgtcccccacctgctccacctgccccacttgtctgtgtcccccacctgccccacttgtctgtgtcccccacctgctccactggcccctgccaccacctgccccacctacccctttccccgacctgccccacctgtccctgtccccacctgccccacctgcccctgtcctcacctgcccaacctgtctgtgtcccccacctgccccactggtccctgccaccacctgccccacctgaccccgcccctcttctaccttcctgaccccatcccctcccctccccctacttgctccacctgtctcaccactgccatatgcccctcctggccccacctgtcctacctgtctcccctgcctccaacctgcccctcttttgccccccacatgtcccccctcccccctcctacctccacctgccccacctgtctccccacccctacctgcccctcttggcctcccacttgtcccccctgcacccacctgcttcctcctgcttctcctgcacgctcaccagcctctgagcaccttcacccctcgatgttctctcctctaaacaagatgactcaccatttatttccagcctaatctctgcccccagcctcagcctccatactgtcacccttgttgacggtgt

SEQ ID NO: 2630 - DNA, 1000 bp, Homo sapiens
  misc_feature (1)..(1000): DMR21:5574101
ggggagaaagggtgttcttgtcttgtgcaggttttcaaagggaatgcttccagtttttgcccattcagtatgatattagctgtgcatttgtcataaataactcttattatgttgagataggttccatcaatacataattcattgagagtttttaccatgaagaggtgtggaattttattgaaggccttttttgcatctattgagataatcatgtggtttttgtcattagttctgtttatgtgatggattttatttattgatttgcatatgttgaaccagctttgtatcccagggattaagctgactagatcgtggtggataagctttttgatgtgctgctggattcggtttgccagtattttattgaggattttcgcatcgatattcatcagggatatgggcctgaaattttctttttctggtgtgtctttgccaggttttggtttcaggatgatgctggccacataaaatgaattagggaggagtacctctttttctattgtttgaaataatttcagaaggaatggtaccagctcctctttgtacctttggtagaattcggctgtgaatccgtctggtcctggacttctttttgttggtaggctactaattactgcctcaattttagaacttgttattggcctattcaaggattcgacttcctactggtttgcacttgggagggtatatgtgtccaggaatttatccatttcatctagattttctagttaatttgcaaagaggtatttataatattctgtaatgatactttttatttctgtgggatcaacggttatatcccctttatcatttcctattgcatgtatttgattcttttcttccttattagtctggctagaagtttatttattttcttgatcttttaaaaaaaccagctcctggattcattgattttttggacgggctttttgtgtctctatctccttcagttctgctctgatcttaaatcttgtcttctgctagtttttgaatttgtttg

SEQ ID NO: 2631 - DNA, 26500 bp, Homo sapiens
  misc_feature (1)..(26500): DMR21:7916001
tttccattgcattcgagtccattccactccagtctgttccatttgagtccattccattccattccattccattccattccattccattccattcgagtccattcgattccattcgatatcattccatttcactctattccattctattcctttcaattacattcaattccattccattcgtttccattccattctattactatccattcgactccattcctttggagtccaatccatttaattccattccattacattccattccgtttgattccaatccgttcaattccattttgttccagtccattccattcgattccattccattcccgtccattccatttgattccagtcctttcgagtcaattctattccattccattccattggatatctttacattacactccctttcattctattctttcaattccattcaattccattcattcggttccattccattcgactccattccattcgagtccattccattccattccattccatgccattcgattctaataggttcgaatccattttgccccagtccattacattcgagtccattccattcgattccattcagttcgattccattccattcaattccattccactcgattccactcctttccattccattacattccattctattcaattccattgcattccattccattccattccatttaattattttccattcgattccattccattcgaatcaattacattacattccattacattcaagtccattctattccagtccattccattccggtccattccattcgatggaattccatttgattccattccattctattgcattccattcgagtacattcaattcgaataaattccattctagacctttcctttcgagtccattctatttctgcattgtattcgagtccactacatttgggtacattccattccactccgttccattctattccaatccattccattccattccattccattcgatgacattccattcaattgtattccttttgactccattccgttccattcagttccatccaattccattccattctattcctttccgttccattccattccattgcatcccattcctttccatttcattcgagtccattcctctccagtccattccattcgaatccattccattccagtccattccattggagtccattccattcaattgcattcaatatatttccattacactccaatccattttatttcttttgattccattcaattctattccattcaattccattccatgtgattccattccattcgaatctattgcattcaattcttttcaattcgattccattccactcgattgcactccgttccattccattgcattccattctatttcattcaattgcattccattccttaccatttgattacattccatttgattccattcaactcgaatcaattatattgcaatccgttacattcgagtactttctataccagtccataccattccactccaatacattcgattccattccatttgattccaatgtatactatttcattccattccaaaatattgcattcctttccattccattctattcgaataaattcctttcgagaccattccattcgggtccattctatttgattccattcctttcgagtccattacatttgcatccattccattccattgcattccacttgatgctattccattctgttctatttcattcgagtccattgcatttgggtccgttccactccattccattccattccattcgacttcattccattagattctactccattcgaatccattcctttccattccgttccatccgattccattccattctattccgttccattccattccatgccatttgtttccattccattcgaatccattccactcaagtccattccattcgagtccattccaattcagtgcattccattcgattccattccattccattccattcagttccatccaattccatttcattctgctcctttccattccattccagtcgtttccattcattcgagtcaattgccctccagtccattgcattggaatccattccattcgagtccattgcattcgagtccattccattcaagtccattccattccattccattccattccattccattccattccattccattccacacgatatcattgcattgccctccattccattccacacgatatctgtgcattgcactctattccattccattccattccattcaattgtattccattcgattccattccatttgattccatttcattatactccattccattcgagtctattaccttccattccattaaattccatttctttccattcgattgcactgagttctattccattttgtcccaactccattccactcggttctattccattcgaatacattccattccattccattccattccattccattccattccattcctctcgattccactctgtggcagtcctttgctgtccattctattccattccattgttttccattccattccttttgattacattccattcgattccattccatatgaatcaattacattgcaatccattgcattagattccattctattacagtccattaaattctgttccattccactccattccaatacattcgattccattccattcggttctattccattcgactccattccattccattccatccgattccattccattctattcctttccattcctttccattctattccatttgtttccattccgtttgagtccattccactccaacgcattccattcaagtcctttccattccattctattccattccactctatttgattcacttccactcaattctactccgctccattcccttgcattgcattccattccattcctttccatttcatttgattacattccattcaattcctttccattcaaatcaattactttacaatcaattatatttgtgtccgttctaatccattccattcatttccagtccattccattcgattccattcaattcgattccattccgtactattgcattctgttcgattccattctacttgaataaattccattggagaccattcctatctagtccattccatctgagtccattccattcgagtccattacttttgtgaccattccaatatattccattaaattccattcgattctattccatgcgagtccattccattcgagtccattgcattccattccatttggtgccattccattctaatctattcctttcaactccattaaactccattccattccacctgactccaatccattctatttctttccgttccattccattccttttcattccattccattagagtccattccactccagcctactccatttgagtccattccaccccagtccattccattcgattccaatcctttcaagtctattccattccattccattccattcaatatctttctattacactccattcctttctactccttttgattacattcaattccattccatttgtttccattccattctattccattcctatcgactccattccattcgagttcgttgcattctattcaattcccttacattcaatgccacagcattcaattccattttgttacagtccattctattcgagtccattccattccatatcattcgatgccattccattcgattctattccattcgactcccttcccttcctttccattccatccgattccattccattctattcctttccattcagttccattgcattacattcaattgcattcctttccatttcattcgtttgtattccattcgtcgccattccattccattccattccaaccgattccactacattctacacttttccgttcaattccattccatttcattccgttcatttctgttccattcgattccactccactccagtccattccattcgagtccattccattcgagtccaatccattcctttccattcgatatctatccattacactccattccattcaaatcattttgattccattcaattccaatccactcgattccatttcattcgattccattccattcgactccattccattcgattccaatccattcgatttcattccattacgttcgattccaatcctttccttcccattttgttgaagtccattccattcgagtcccttcccttcgagtccattcatttcgattccattccattcgattccattccactcatttccactccattccattccattgcattccattctattccattccactgcattccattccattccatttgattacattccattcaattccattccattcgaatcaattaccttacaatccattacattccagtctgttctattctagtccattccattccggtgcattacattcaaatccattccattcgattccattccatttgtttccattccatactattgaattccattcgattccattattttcgaataaatttcattcgagaccattactttcaagtgcgttctatttgattccattgcattacagtccattatgtttggtccattccattccattccattcgatgccattccattctagtccattccattcctgtccattccattcgagcagattccattctattccaatccattcgatgccatttaattccattctattccattcgactccgttccataccattccattccgtccgatttcattccattctattcctttccattccattccattccatttgatgccattccaaatgattctattccattcgagtccattccactcgtgtccaatccattccattgcattccattccaatccatttgatgcgatttaattccattctattcctctcgactccgttccactccattccgttccatccgtttgcattccattctattccattccattccattcgtttccattccattcgagtcctttccattttattccattccattcgatatcattccattacaccaaattccattctattcattttgatttcattcaattccatttcatttgattccattccattcggttccaatccattcgacttcatttgattcaagtccattccattccaatccatccctttacattccactggattccaatccgtttgattccattttgttccagtccattccattgcagtccattccactccattcctttccattcgatggcattccatttgattccattccacttaattccactccattccattccattgcattccattatattccattccattgcttaccattccattcaatttgataatcttaaattcgattccattccatacaaatcaattacgttgcaatccaatacattcgagtccattctattccagtccatttcattcctgtccattccattcgattctattccatttgattccattccatacatttgcattccattcgattccattctgttcaaataaattccattcgagaccattctttttgagtccaatctatttaagtccattccattcgagtccattatatttgggtacattccattccattccattccattgcattccatttcactcgatgtcattccattcgattctattccattcttctctattccattctattttgttcaatttgattccattacattctagtcctttccattctattgtttccattcctttcgtttccattctattcgagtccattccattcaggtccattcctttccattccatttgatgccattccaatcgattctattgcattcgactccattccattccatttctttccatccgattcctttactttctattcctttccatttcattccattccattctattccattccagtccattccattcgagtcccttccattgcattccattccactcgatatctttccattacacccaattccattctattcctttcgattccattccattccgttccattccaatccattccattcggttctattccatttgactccattcctttcgagtccattgcattccattcaatcccattctgttaaattcgattccaatcctttcgattccattttgttgcagtacattgcattcgagtccattccattccattcccttccataccattcgatgccattccatttgattctattccattcgactccattgaattccattcagttcaatacgattccattacattctattcctttgcattaaattccattccattccattccattccattccattcgtttccattcctgttgagtccattccaatcgagtccattccattcccgtccattccattcgattctattccattcgataccattctatagtttgcattccattcgattccattctgttcaaataaattccattcgagaccattcctttcgtgtccattctatttgggtccattccattcgagtccattacatttgtgtccattccattctattcctttctctttgattccaatccatttgattccatttttttccagtccattcaattcgagttcattccattccagtccattcgatgaccttgcaatcgattctattccattctgctccattccattccattccgttccaaccgattccatttcattctattcctttccattccattccattccattccattccattccaattgcttccattgcattcgattccaatccactccagtccattcccttcaagtccattccattccagtccattcctttcgagtccattccaagcaattccattcgatgtttttccattacactcctttccattctctatctttagattccattcagttccattccattcaattcaactgcagtcaattaaattccatttgacaccattccattcgagttcattccactccagtccattccattcgagtccattcccttccattccattctatttgatagctttctattacactccattccattctattgctttggattccattcaattccattccattcgattccattccatttgactccattccattcgagtccattacaatccattccattccattccattccaacgctttcgactccattttttcccgtccattaccttcaattccattccatttgattccattctactcgattcctctccgttccattccaatgcattgcattctattccattgcatagcattccattccattccatttgattacattccattctattccattccattcatatcaattacattgcattccgttaatttgcagtccgttctattccattccattccattctggtccattccattcaattccattccattcgattccgttccatactactgcattccattcaattacattctatttgattatattccattcgagaccattccattcgagtccattctatttgagtacattccatttgagtccattatatttgggtccattcctttccatgccattccattccactcgattccattccattcgattatattcaattcgagtccattccactcgaattcattccattccattccattccattccattccattccagtccattccgtttgatgccattccattcgactccattccagtcgaagccactcctgtccactccattcaattccattcctttctattccaatccgtttgattccattttgtgccagtccattctattgaagtccattcaattccagtccgttccattcgattccattccatttgattccattccactcaattccactctgttacattccattgcattccattctattccattccattgcattccattccattctatttgattacattgcattcgattccattccattcgattccattccattccaatcaattatatggcaatccattacattcgagtccattctattctattccattccattccagtccattccattcgattacattccagtcgattcaattccatactattgcatttcattcgattccattctatttgaataaattccattagtgaccattccatttgagtccattctatttgattcaattccattcgagcccattacatttcagtccaatccattccattcctctcctttccaatacattcgatgccactccattcaattctattccatttgagtccattaccttcgagtccattccattccattgcattccattcgatgccattctactcgattctattccatttaactccaattctttccattccgttccatccgattcctttctcttctattcctttccattctattcaattccattccattcattatatttccattacactccattccattctattccttttgattctattcaattccattccattcgattccattccacttggttccattccattccactccattccactccattccattcgttatatttccatcacactcctttccattctattcctttctattccattcaattccattccattcgattccattccattcggttccattccattcgactccaatccattcgactccgttccattccaatccgttccgttcatttcgattccaatccgctccattacattttgttccagtccattacattccagtacattccattcgattccattccattcatttgcattccattcaattccattccactcaattccactccgttccactccattacattccattctattccattccattgcactccattccattccatttgattacattccattcgattccattccattcgaatcaattacattgcagtccattacattcatgccctttctattaaagtccagtccattatggtccattccattccattctattccattccattcgaatcaattactttgcaatccatcacattcgagtacgttctgttccagtccattcaattctggtctattccattcaattccactccatttgattccattccattctagtacattccgctggattccatcctattcaaataagttccattcgagaccatttcttcgagtcaaatcaatttgagtccattccattcaagtccattacatctgggtctattccattccattccattccattccattcgatgccattcaatttgattcatttcctttcaactccattccattccattcagttccatccgattccattccattgtattcctttccatttcattgcattccattccattccactggagaccattccactcaagtgcatttcatttgagtctattccattccattccattccagtcgatatctttccattacacttcattccattctattcctttacaatccattcaattccattctatttgattccattcaatacaattccattacattcgactccatttcattcgagtccattgcattccattccattccattcctttatgttctattccattccattcgattccgttttgttccagtccattccactcgagtccattgcattacagtgcaaaccatttgattccattccattcgattctattccactccgttccattcctttgcgttcctttctattccattcaattgcattccattccattccatttgattacattccattgaattccaatccatttgaatcaattacattgcagtccattacattcgagtttgttctattccagtccattccactctggtgcattccattcgattccattccatttgataccattccatactattgcattccattcgattccattccattcgataccattccatactattgcattcctttcgattccattcttttcgaataaattccattcgagaccattcctttcgtgtccattctatttgactccattctattcaagtccattaaatttgtgcacataccattccattccattcggtgccattccagtccactctattccattcaagtccattacattcgaatccattccattccattcgatgccattcgattcgattctattccattcgactccattccattccattcccttccaaacggttccattccattctattactttccattccatttcattccattccattccattccattccattccattccattccattccattccatttcgttccgttcctttctgttccgttccgttttgttccattccattccattccattccattccattccatttcattccattccattccatttgcttccattccattagagtccattccactccagtccattccattcgtgtccattccattcgtgtccactgcattccattccactccattccatattattccattacactccattctattctgttactttcatttccattcaattccattccatttgattccatcccactcggtttcattccattcgactccattccatttgagtccattccattccattccatacagttccattccatttgagtccattccattccattccatacagttccattccattccgttccattccattccattccattccattatgttccattccattccattccattccattccattccattccattccattcgcttccattccattttgttccattccattttgttccgttccattccattcgaatccattccattccattccattccatttcattccattcgactgcattccattcgaatcaattgttttgcaatcccttacattcaagtctgttctattccaggccattacattctggtccattccattcgattccattccatttgattccattccattctattgcattccattcgattccattctattcgaataaattccattcgagaccatttctttcgagtccattccattcgagtccattacatttgggtctattccgttccgttccattccattccaatccattcaatgtcattccatgtgattctattccattagactccattccatttcattccattccatccgattccattccattctattcctttccattccattccattccattcgtttacaatccatttgagcccattcaactccagtgcctttcatttgagtccattccattgcattccattccattccactccattccattccattccaattgattcgattcccttccactcaattccactccatttcattccattgcattccattccattccattccattccattccattccattccattccattccattccattcctttccattccatttgattacattcgattcaagtccattctattcgaatctgttacttttcaatcgattatatttgagtccgttctaatccagtccattccattctggtacgttccttttgattgcattccattcgaatacattccatactattgcattccattcgattccattgtattagaataaattgcgttcgagacctacctttcaagtccattctttttcagcccattccattcaattccattacatttgggtccattccattccattccattgcattcgatgctattccattcgaatctattactttcgtgtatattccattccattccattccattccattccattctgtatttttccattaaactccattccattctattcctgtcgattgcattcaattccattccattcgattcctgtccatttgattccattccattcaactccattccattcaagtccattccattccattccattcaattccattccattcgattccaatccattcaattccactttgttcaagtcgtttccaatagagtccattccattccagtccattccattcgattcctttccattcgattccattccattctattctgttccatccgatttcattgcactctattcccttcccttccattccattctattccattccattcaatgccattcaattctattctattccttttgagtccattgcattcgagtccataccatttcaatccattccattccataacattcgatgccattccattcgattctactccattagattccattccattccattctgttccatctgattccattgcattctattcccttctcttccattcccttctcttccattccattcgatgccattcaattctattctattccctttgaatccatttcattcgagtccataccatttcaatccattccattccattcgatgccattccattcaattctattctatttgactcagttaaactccattcctttccatccaattcctttcctttctattcctttccactgcattccaatccattccattcgattccattccattcaattccattcttctccagtccattcctttcgagtccattccattgcagtccattccattcgagtccattccattccattccgttcgataactttccattaatctccattccattctattcctttcgattccattcaattccattccattcgatatctttccattacactccattccattctgttcctttcgattccattcaattccactccattcgattccattccactcgattccattccattcaactccatgccgttcatgtccattccattccattccgttccattctattccaatccgtcactttccattttgttccagtcaattccactcgagtccattccattgcagtccattccattcgagtccattccattccattccattcgatatctttccattactctccattccattctattcctttcgattccattcaattccattccattcgatatctttcctttacactccattccattctattccttttgattccattcagttccattccattcaattccattccattcaattccattccattcgactccatgccattcatgtccattccattccattccattccgttccatttgattccaatacgttactttccattttgttccagtcaataacactcgagtacattccattgcagtccattccatttgattcccttccattcgattcgattaaattccatttgattccattccactaaatttcattctattccattccattgcattccattctattccattccattgcattccattctattccattccattacattccattccattccatttgatttcattccattcaattccaaggcattcaaatgaattacattacaatccattacattcgagtcctttctattccagtccattccattcttgtccattccatttgattcaactccattcaataccatttgatactattgcactcctttggattccattctatttgaataaattccatttgagaccattccttttgagtccattctatttgagtccattccattcgtgtccattacatttgggtccgttccattgcattccattccattcctttctattccatttgataccattacattagaatctattccattagagcccattccattcgaatgcattccattccattccattccatgccattcgattcgattctattctattcgactccattccatttcattcggttccatctgattccactccattcttgccctttccataccattccattccattggtttccattccattggagtccattccactccatcccattccattcgagtccattccattccagtccatttcatttgagtccattccattccattcaattccacttgatatctttccttttcattcctttccattcttttcctttcgattccattcaattccattccattcgattccattccactgtattcctttccattcgactccattccattcgaatccattccttttcattccattccattccattcctttctgttcgacttcattccgttcgattcctatttgttgcagtccattccattcgagtccattccattccagtccattcaattcgattccattccattcgattcccttccatttgattccattccactcgtttccactccattgcattccattgcattccattctattccattccattgcatatcattacatttcctatgattacattccatttgattccattcagctcaaatcaattggattgcaatctattacattcgagtccgttctattccagtccattccattctcgtccattactttcgattccattccatactattgcattccattcgattccactgtattcgaataaattccattcaagaccattcctttttaatccattctatttgagtctattacattcaagtccattacatttgggtccatccaattccagtccataccattcgatgtcattccattctattctattccattctactccattccattccattaaattccattccattctgttccattcgattccaatccattacattccattttgttccagtcagttccactcaagtccattccattttattccattcaattccactcgagtacattccattccagtccattccattcgattccattcctttcgattccattccattcaattcgattaaattccatttgattccattccactctattccattctgttccattccactgcatgccattctattccattcctttgcattccattccatttcgtttgattacattccattcaatttcaaggcattcgaatcaattacatttccatccattacattcgagtgttttctattccagtccattccattccagtccattccatttgattaaattccattcgattcatttagatactattacattcctttcgattccattctattcgaataaattccattcgagaccattcctttcgagtccattctatttgactgcattccattcgtgtacattacatctgggtccgttccattgcattccattccattcctttccattccattccatgtcattactttcgattctattccattagagtccattccattcgagtccattccattccattccattcgatgtcattccacacgattctattccattcgattccattccattccattcagttccatcctattccattccattgtagtcctttccattccattccattcatttcctttccattcgagcccattccactccagtccatttcattcgagtccattccactccagtccatttcattccattccattccgttcaattccatttgatatctttccatttcactccgttccattccattgcattctatttaattgcatttcattccactccattccattcgtgtccattccttttcattcctttccattccattgcattctgttctacttcaatccattcgattccattttcttccagtccattccattcgagtccattccattccagtccatttgatttgattccattccatttgattcccttcctttcgattccattccactcaattccactccgttcctttccattgaattccattccattccattccattgcataccattgcattccatatgatttcattccatttgattccatacaactcaaatcaattggattgcaatgaattacaatcgaaaccattttattccagtccattccattctggtccattccatttaattccattccatactattgcgttccatttgattgcactgtattcgaataaattccattagagaccattcctttttaataaattatatttgagtctattgcattcgagttcaatacatttgggtccatccaattccattccattccattcgatgccattgcattcgattctattccattcgagtccattccatttgattccattccgttccattccattccattcgatcacattcctttcgattccattctgctccagtccattccattcgagtactttccattcgagtccgttccattggaatccattccattccattccattgctttcgatatctttccattacactccattccattctatttcttaagattcaattcaattccattcctttctgtttcgttccatttgactccattccattcaagtccattccatttcattccattctgtccgattcaattccgttcaattccattttgatccaatccaatccgttcgagtccattctatttgtttcccttccattccattccattcctttcgatgccattccattcaattctattcaagtccattccgtctgagtccattcgattccattccaatccactccattccattagatgccattccatttgattctaatccactcaactccattccattccattcctttccatccgattccattccgttctattcctttccattccattccattccattccattcatttccattgcttttgagttttttcctctccagtccattccattcgagtccattccattgcaatccacttgattcgagtccattccattccattactttcattcgataactttcctttacactccattcctttctattcctttctattcatttcgattctattcaattctattccattcgattccattccattctactgcattcctttctagtccattccattccattcgatatctttccattacactccattccactctattcctttcaattcctttcagttgcattccattctagtccattccattaaaatccactccattcgattccattccattccattccttttgattcgatatctttcctttacactccattcctttctattcctttcggttctattcaattccattccattcgattccattccattcgattccatttcattcgactccattccattcgagtccattccattccattcaattccattcgatatcttccattccattccattccattctattcctttgaattccattcaattcaattccattcgagtccattctattgcattccattccattccgttctgttcgattccaatccattcgattctactttgttccagtccattccattcgaatccattcccttccagtgcatcccatttgattccattccattcgactccattccactcgattccactccgttccattctattacattctattctattccattccattgcattccattccattccattttattacactcctttcgattccattccattcgaatcaattacattgtaatccattacattcgattccattctattccagtccattccattcctgtccattccatttcgttagattacatttgattccattaaatactattgcagtctattcaattccattctattagaataaattcctttcgagaccattcctttcgagtccattctatttgagtccatttctttcgactccattacatttgggtccattccattccattcctttccagtccattacattgcagtcgctgccagtccattcgattctattccatttgagtccattacatttgggtccattccattccactccattccattcgattctattccatttgagtccattccattcgggtccattccattcgatgccattccattcgagtccatttcactccagtcgattccattcgatgccattccattcgagtccatttcattcgaatccattccattgcattccattcgattctattccattcgactccattccctttctttccattccatgaaattccattccattctattcctttccattccattccaatgtattacattccattccgttcgtgtccattccactccagtccattccattcgagtccattccattccagtgcattccattcgagtcaattccatttaattccattagacatttttccgtttcactccatttaattctgtttctttcgtttccaatcaattccattccatttgattccgttacattcgattccattccattctactccattccttttgactccatttctttccatttcattgcattccgttccgttcgttgccaatgcgtttgattccattttgttcctgtccattccattcgagtccattccattcgagtccattccattagattccattccattcgattccatgccactcgactccactctgttccattccattgcgttgccttctattccatttctttgcattccattccattccagtgcattccattcgtttccattctattagactccattccactccagttcattcctttcgagtccattacattccagtccattccactcgaatccaatccattccattccattcgacatctttccattacactccattccattctattaattttgattctaatcaattccattccaatagaacaccttcctttcgattccattcctttcgactcctttccattcgagtccattctattccattctattccattccattaaattccattcctttgattacattccattcgattccattccactcgattccactccgttacattttattgcattccgttctattccattccattgagtaccattccattctattctattccattcgagtcgatttctttagagcccattccattccattccattcgatgtcattccgtttgattcttttccatttgaatccattccattccattctgttccatccgtttccattccattctgttccatccatttccattccattctattcctttccattccattccattccatttgtttccatttcattcgattcattctattcgaataaattccattagagaccgttcctttcgagtccattctgtttgagtctattccattccagtccattacatttggttccattccattcccttccattcctttccattccatacgttgccattccattcatttctattccattcgactccattccattccattccattccatccgattctatttcattctattcctttccattccactccattccattcgtgtccattccatttgagtccgttccaatccagtccattccattcgactccattacactccagtccattccatttgaatccattccattccagtccattccattcaagtccattccattccatgccattccattcgatatctttccattacaatcctttccattctattctttttattccgttcaattccattccatgtaattccattccattcgattccattccattcgactccattccgtttgagaccattacattccatttcgttcaatttgattgcaatccgttcgattccattttgttccagtatattccgttcaagtccattcaattccagtccattccattcgattccagtccattcgattccattccattccaattgattcttctccgttccattacattgcattccattctataccattccattccttttggttacattaaattcgatttcattccattcgagtcaattactttgcaatccattacattcgagtccgttctattccagtacattccattcgattccattccattgcattccattccatactattgcattccatttggtcccaaagttttcgaataaattccattcgaggccattcctttagagtccattctacttgagtccattccattcgagtccattacatttggatccatttcattccatcccaatccattccattccattcggatccatttcattccattccattccattcgatgccattccatacaattatgttccataggtgtccattcctttcgaatccattccattccattccattccgttccatgagattacaatccattcgattgcattccattcaaatcaattacttttcaatgccttaaattgtagtctgttccattccagtccattccattcctgtccattccattcgattccattccatactattgcattcaatttgattccattctcttcgaataaattccattcaagacaattcctcttgagtccattccattcgaatcaattccattcaattccattccattcgtttccattcctctcgattccactccattccattctattgcattccattctgttccattcccttgcattcctttccattccatttgactacattaaattcaattccatttcatttgagtcaattacattgcaatccattacattcgagtgtgttgtattccagttcattccattccattccattccattccattggattctattccatactatttcattcctttcaaatccatgctattcgaataaattccattcaagaccattcccttccaatccattctatttcagtcccttcaattcgagtccattgcaatggggtccattccatttgtttccattccattcacttcgatgccattccattccattctattccacttgagtccattccgttcgagtccattccattccattccactccattccattcaattccattgcattcaattctattccattcgactccattccattacattccattccatccgattacattccattccacccgattccattccattctattcctttccattccattccattcattccattccattccattccatatttccattccattcgattccattccactccaggacattacattccagtccataccattagagtccattccattagagtccatttcattacattccattccatttgatatatttcctttccattccattccattccattgtattcctttcgattccattcaactctacaccattctattgcatttcattcaactccattccattcgattccattccaatccattccattaaatttcgttctgttcgattccaatccgttcaattcctttttttccggtccattccattcgagtccattccattccaggccattccaatcggttccattccactcgattacattccatttgattccattccatttgattccactccattccattccattgcattccattctatttcattccattccatttgattacattcgattcgattctattcccttcaaatcaattacatttcagtccaatacattcgagtccgttctattccattccattccattccattctgttccattccttttgattccattccattccattcccttccatactgttccattacattcgactctattctatttgaataaattccattcgaagccaattctttcaagtccattttttttagtcccttccattcgagtccattacatttgggtcaattgcattccattcctttccattccatttgatgccattccattcgattctattccattcgagtccattcctttccagtccattccattcgttgccattcgattcgattctattccattccactccattccattacgttccatccgattccaatccattctattcctttccattccaatccaatctgctcgattccattccattcattgcgatccatttcattcgtttcatttccattcgcgtcatttccactccactccattccattagagtccattcaattccactacattccatttgactcctttccattcgatttctttccattaaaaccattccattctattcctttggattctattaaattccattcttttccattccattccataccattccattccattccatttgactccatttcattcgagtccattccattcaattccattctgttccattctattccaatctattcaattccactttcttccagtccaatccattcgagtccattacattccaatccattccaatcgattccattcctttctattccattccgttgaattccattccattcgattccagtccaatccattccactgcattactttctattccattccaatgcattccattccactccgtttgatcacattccattcgattccattccattcaaatcaattacattacaaaccattacgtatgattccattctattcctgtccattccattcctgtccattacatttgattctattccattagaatccattccatactattgcattccattcgattccattctattcgaataaattccattcgagaccattccttttgagttcattccttttgagtccattccatttgagtacgttacatttggttccattccgttccattccattccattccattagatgccattccatttgattctaatccattcgagtccattccattcgacttcattccattccattcaattccattccattcaattccattccatttcattccattccattccatttcattccattccattccatttcattccattccatttcattccattccattccatttcattccattccattccatttcattccattccattccatttcattccattccattccattcgaagcaattcctttggattctattccgttcaactccattccatttcattccatttcaaccgattccattccatttcattccattccatccgattccattccattccattccacccgattccattccattccattccactcgtttccattacattcgtgtccattccactccagtccattccatttgagtaaactgcaatccagtccattccattgaagtccataccattctatttgatatctttccattacactcccttacattccattccattcgatgccatttcattccattccattccattcaagtccattccattagagaccatttcattccattgtgttccatcccttccgcttccattccattccattccatttcattccattccattcgtgttcattacattcgagaccattccactccagtccattaaattcaagaccattccattccagtccattccattccgttctgctcaattccaatgcgttcaattccattatgtgccagtccagtccattccagtccattccattcgattccattccatttgattctattccatactattgcattccattcgattccattcttttgaataaattgcattcgagtccattccttttgggtccattctatttgagtccattccatacgagtccattatatttgggtccattccacactattccattccattccattccattccattccattccatgcccttccattccattctattccattgagtccactccattcgagttcattccattccattccatttgatgccatactattctatactattccatttgactccattccattccattccattggatgccatatcattctattctattccatttgactccattccattccattactttccatccgattccattcctttctattccttttcattccgttcccttccattgcgttgcattccattccattccattggtttccattccatttgcgttcattcaactccagtacattccattcgattccattcccttcgactcccttccaatcgagtccattccattccattcaattcctttcagtttgattccaatccgttcaattccattttgttccagtccattccatttgaatcctttccattccagtccattcctttcaattccattccattcgaagccattccattggattctattccattcaactccattccattccatatcattccatccgattccattccattctattcctttatatttcattcccttcctttccattccatgacattccattcgtctccattccattcgagcccattcctctccagtccattccattcgcgtgaattccattacagtcctttccattccattactttccattcaatatctttccattgcactccattccattctcttcctttcgattccattcaattccattccattcggttcgattccatactattgcattccattcaattccattccattcgtataaattacattcgagaccatttctttcgagtccattatatttgagcccattccattcgattccactacatttgggtccataccattccattccattccattccattcgatcccaaaccattttttttctattccattcgagtccattccaatcaagtccaatccattccatttgatgaaattccattcgattatattccattcgagttgatttcattccatttggttccatccgattacattccattctattccgttcctttccattccattccattccattcttttccaatccatgcgaatccattccactccagtccattccattcgtgtcccttccattccagtccatgcctttcgagtccattccattccattcccttcaatgtctttcaattacactccattccattctatttcattcgattccattcaattcaactctattcgattcccttcacttcgattccaatccattcgactccattccattcgagtccatttcattccattccaatgcattctgttcctttccataccaatccgtttgattccatttagttccagtacattgcattcgagtccattccattccattccattcgaagccattgcattcgattttattgcattgaactccattccattccattcctttccatccgattccattccattttagtcctttccattccattccattctattcgtttaaattccaattgagtccattccactccagtccattccatttgagtccattgcgttccagtccattccattcgagtccattcctctccattcctttccatttgatatctttccattgcactccattcctttctattcctttcgattctgttcaattccattccattcgattccaatccatactattgcattccattcaattccattctatcatataaattacattcgagaccatttatttcgagtccattcaatttgagcccattcaagtccattacttttgggtccattccattctgttccattccattccattcgatcccattacatttgtttctattccattcgagtccattccaatcgagtccattccattccattcattgaaattccattcgattctatttcattcgagttgataccattccattccgttcaatctgattccattccattctattccattccattccattccattccattccattccattcgtttccatgccatttcaatccattccactccagtccattcctttcgagtccattccattccagtccattgcattcaagtccattccattccattccattcgaagccattgcattcaaatttattccattcgactccattccattccattccgttccatccgattccattccattctattcctttccattccattttcttccattacattcatttccattccattcctgtccattccactccagtccattccatttgtttccgctccattccagtacattccattcgagtacgttccattgcattccattcaattccattcgatgccactccattcgattctattccaatcgactccattccattccattccgttccatccgattgcattccattctattcctttccattccattcccttccattccattcttttccattccattctgtttcatttcattccattccattccattcaatgccattcaaattgactccattccattccattccgttctatctgattccattccattttattcctttgcattccattccattcctttccaatccattccaatcttctccattccactccagttcattccatttgagtccattccattacagtccattccattcgagtccattccattcgattccaatcgattcgattgcattccactcgattccactccattcaattccattgtattccgttctattccattccactgcattccattctattccattccattgcattccattccattccatttgattacattccattcgattccattccattcaaatgaattacattgcagtccattacatttgactctgttctattccagtccattccgttcctgtccattccattcgattccattccattcgatttcattccctccgattccattccattctttaccattctattcgaataaattccattcgagaccattggtttcgagtccgttctatttgagtccattccattcgagtccgttacatttgggtccatcccattccattccatttaatgccatcccatttgattctattccattcgagtccattgcattctagtccattaaattcgagtccattcctttacactccattcccttccattctattcgactccattccattcctttccattccgttccattccgttccattccattccattccgttccattccattccattcgattacattccattcgcgtccattacattcgattccattccatttgattccataccttttgattcaattccattcgagtccattccataaaattccattctttcctttccgttcctttccagtccattcg

SEQ ID NO: 2632 - DNA, 5700 bp, Homo sapiens
  misc_feature (1)..(5700): DMR21:7950101
acaccattccattcccgtccattccactcctctctactccacttcaccacattttattcgatgccattcgtttccattccattccattccattccattccattccattccattccattccattctgttccattccactcggttttaatcaattccattctattccattccattgcttttcaattcctctccactccactcaactccattcaattatatttcttctctttccattccactccattcaaaaccagtgcactccactgcattcaattccattccacccctctgttctccacttcaccacattccagttgattccattcaattcctttccattggattccattccattggattgcattcctatttctttctattctattgcattccattcaattccattccatttgtgtccattccattccattcccttccattccattccattccattccattcccttccattccagtccatttcattcttttccattccattcctttccattccattccattccattcagttccatttctttcctttccattgccttgcattccattccattagattccattacattcgattctcttctatttgattcctttcatttgattccattcctttcgtctgcatttcattcgattcctttacattcgattccattcccttctattgcattccattcgattgcattctatttgataccattccattccgttccattccattccattccattccattccattccattccatttcattcgattccattcattttgagtccgttccattgcaatccattccattcaagtccattcgattccactccattccattcccgtcccttccattcgattgcttttcattcgattccattccactcgattccattccctttgcatccattcctttcgagtacattcgattagtgtacattccattcaagtccattccattcgagtccattccattccagaccatttcattcgattccatcccatttgcttccaatccattcgatccccttccttttgattccacactgttagagcccattccatttgagtccaatccatttgattccattacattacattacattgcattacattacattcgattccattccatttgattccgtttcattggattccattacattggagtccattcctttccatttgattccattccaatccattccattccattccattccattccattccattccattccattcaattccattccattctaatcccttccattccattccattcctttcgagtccattccattccagtccattcctttcgagtatattccattccactccattccattccattccattggagtccatgcggcttgagtcaattccacccgagtccatttcattcgagtccattcctctcgagtacattccatttcactccattccattccattccattccattccattccatttgagtgcattccattcctatccaatccattcgagaacattccattccattccattcctttccatttgattccattccattacagtctgttccattcaagtccattccattccgttccattccatttcattccattccatttcattggaatccatgtgtcttgagtccattccacccaagtccattccattcgagtccactccactcgagtccattccattctagtccatttgactcgagtccattcaactcgagtccattcaattcaagtccattcctctccagtccattccatttcactccattcaattccattacatttcattcgattccattccatttgattccgtttcatttgagtccattccattcctgtccaacccatttgagcccattccattccattccactcctttccatttgattccattctattcgagtccattcgcttcgagtccattccattctagttcattccactagagtccattccattcaattccagtcaattcgagtctgttccactcgattccattccattcgagtccattccgttccatttgatttgattccattccattcgggtccattccattcgtgtccattccactgaagtcaattccattctagtccagtcaactcgagtccattcaactcaagttcattccattcgagtctattccactcgagtccatccattccactccattccattccagtccattccattcccctgctctgaactccattaccttccactacactccattccactccattgcattccattccactccactccaatccactccactatgttcaattccattccttcacattccattccattgcactgctttacactcaactcaactccactctattcacttccatttcacccctttccattcccctccattccacaccactgccctccatttcactgcattccattcggttccaatcgatgccattctattccattcctttcggttccattccaatcgattccattctattagaatccattccatttgatttcattccattcgagaccattccattccattcgatccaattccattcgattccattccattctattcaattcctttcgaatccattccattttactcctttccgttgtagtccattgcattccattccacttgatttcattccattccattcgtttccaccccattccattccattccaatctattccattcgattccattcaattccattccgttccgttccattccatcccattcaattgcattccaatgcattccattccattcctttccattccattccattccattcgatatctttccactgctttccattccattccattcgagtccattccattcaagtctattgcgctcgagtccattccattccattccattccattccactccactccactacattccattaccccatacccattgtattccactgcattccagtccattccactccattccattccattccattgcattccattcaaatccactcccatccaatccacaccgttcaattccattccttccccttctattccattccactccaaaccactccactccattccactccaccccactacattccaatccactccactccactacattccattccactccactccactctactccactcctctctgttccactcaaatccgttctattcctttccttcccattccattccactccattccactgcactccactccattccattggatcccattccatttgattccattccattcaattcaattccttctgtttccattccatttgagtcctttccattgtagtccattgtattccattccattccattttactccattccattccattcaattccactccattcgatcccactccattcgatcccactcctttcgatcccattccatttgattcaattccattttattccattcaatttgaatgttttccattcgaggccattacattggagtccaatccattccattgcatttcatttcattccattgcattcgattccattccattccattgcgttcttttccattccattccattccattctgttcttttccattccattcgtatccattccatttcagtccattccattcgattccattccattccagtccattcctttttattcctttcctttcgattccattccattcaattgctttcaattcgattctcttccaattgattccattcctttggagtcaatatttttcgagtccgctgcattcaaatccattccatacgagtccatttcattccagtcaattacatttgagtccattccattccagtccataccatttgattccattcccttccattcaattcaatatctttccattccattccattcaaattcattccattagattctattccattagatgcgagtccattccatttgagtgtattccactcgagtacattccattccattccattccattccactccattccattccattcctctgcatttgattccaatacactccattccattccatcccattccattgcattccattcgaatccactccactccactccacttggttcaattctattctttcctattccataactttccactccattccactccactccattccattcaatttcatttcaccccactgcattccaatccattctactccactgcactctgcttcaccgcattccattcgaatccatttgtttccatttgatttcattccacttgattccattccattcgattccattccattcatacccattccatttgattccgttccattccattggagtccatttcattcaattccattccattcctttccattccattccattccattccattagattccattctattctattctattccattccatttgtttccattccatttgactgcatttctttcgattccattccattcgattacattacattctattgcattccataagattacattccatttgataccattctgttccattccattgcataccattccattccactcgattccatgttatttgattccattcattttgagtccattccattgcaatccatttcattcaagtccattccgttccactccattccattgcagtccattccattcgattgcattgcattcgattccattccattcgattccattccactcgattccattcccttcgagtccattccattagtgtccattccattcgagtccattccatttgagtccattccattccaggtcattacatttgattccattccattcgattccattccattcgatccccttccattcgattccataccattcgggcccattccattcgagtccaatccattcgattccattcgattccattccattccattccattccattccattccattccattgctttccattcgattccattacattggagtctattccattccagttggttccattccattatattccattatattccattcgagtccattccattcctgtccattccattcgactccattccactccattccattttattccattccattccattcctttccattggagtccatttggctggagtccattctacctgaatccactgcattggagtttattccactcgtgtccattccattctagtccatttgactggagtctattccactcgagtcccttccactcgagtccattccatttctatccattccattccttcccatttcattcaattccgttccattcgagtccattccattcctgtccaatccattcaagtccattccattccattccattcctttccctatgattccgttcaattcaagtccattcccttcgagtccattccattcctttccattccattccattccattggagtccatgcggctcgagtccattcggcccgcatcaattgcattcgagtcctttccactcgtgtccattccattctagtccatttgactcgtgtccattccacacgagtccattccattcgagtccattcctcccgagtccattccatttcactccattccattctattccatttcattctattccattccattcgattccattccattcgagtccattccattcctgtccaatccattcaagtccattccattccattgctttccatttga

SEQ ID NO: 2633 - DNA, 1400 bp, Homo sapiens
  misc_feature (1)..(1400): DMR21:9070001
ctccttctcagtcatgggggttgcaacacactgcgatcatacccagtgtcacctggttttacataggtttacggagaggtgacacttgcttctggggtccctcgggataagtgggacagaggagaaaggtgttgagggcccaggccaggtgatgagagggggcagagtggtgggcaggcgccggagccgtcttcggggttcagggtgccccaccttgtgcaggtggtgctgcagcttgtgccgcgcgtcctccagttcctcacagcggcgcccgaaggccaggttcacggcgtcacactggagtcccaggtcctcggaggtgtcgcgaaggatgcagtccaccagcacccacaggttggccgagtccaggcgctcgcgctgggcgtggcacagattgtcctgtgtgaacttggtccgggtctctggggtggaggcgctgcggggctggggacagccaggagagggtcagggaggctatgccagtggctgggggccctgccgcgcccccattccctgtctgcaccccatgctcctggaggaactgcatggactccaatgcaccccgtgcagactcacaaagcccagtcccccaagctccctgcctccgagtgccccccgcccacaactcccctgagtccacccacaccctacccaccccgggcacttagtcccctcctgcccccgcgaccccgttcccagcaccgctgcccccaaggccccctctgcagcacctccgtcccccgcagccccccttccctagtacccagcgcccgcgtccgcttctcgcacccaggagtttgccatgctcaagtgggcggtggtcgtgctccctctgctggccttgggtggaaatgcaatcctgccggcgcctggggctgaccgcatcccaccctgtcctgtctacgggcaaccaggctgtgcacgcgctgggcacttgaggaggtcttgcacgctttctcatgccaggggcagacagttgcccaagtgccctcgggggcgagggcctctgggccaggctgggggaagcagcgccgctggggcccccaggcagagggaggcgagaccacagccagggcaagcacggggacagagctggggtccccatctcttggaaggtggtggagtgccggatgagcctgcacctcggtgctctggctgtggtggcgcccgaaagtctcgtcgaggttgtaggcctccaccttgtccgaccagtccatctcgcagatctccgtgtgctctctgttcagtctggggcggggtggggcagggtcttggtgtgtggccagggagggccccactgggtaccctccatgctgcaggctaggccttcatgcccgcttcaggagggagctctgggccggctgtccttgtgctcagcagtgacgaagagctgccgccca

SEQ ID NO: 2634 - DNA, 3500 bp, Homo sapiens
  misc_feature (1)..(3500): DMR21:9342901
gtgtgagtggcagaagtttggctgttgggattggccaggactcagctatagttacaggtgcatactccaaagttaggttatcagtctttctacctattaagttaggttgcagtttgtccacagggactcaaatctagaagtacagagtccttcccaggccatatttagttcactgtaacagttcctattatgacctcactgacagttctttttctctgaattttcctttcttctcaacagcttgtccaaatgttccattggtccctgttcatcccgccctgcagctctccttgactgattctgccctttgtggtttgcagtcctgtttctctacagcttggaccccttcaatctttccatcataggtttaactctctgttgaattcttatttgtagctacgcaaatgttaccttaagctaaaaaaattcaaagtgaaagccacatcctcctctcttcccttatgtgtatggtattactaccatgcagccagtgacccaaaatgggattttttctgggcttttcttgcttagattcaggctcatctggtgtcaagccttgttacttttgtttccttgttcttttatttttaattttttttcttttgagacagagtttcactcttgttgcccaggctagagtgcagtggtgtgatcccggctcactgcagcctccacctcccgggttcaagcaattctcctgcctcagctcctgagtagctggtattacaggcatttgccaccacgcctggctaattttgtatttttagtagagatggggtttctctgttttgatcagggtggtctcgagctcccgacctcaggtgatctgcccacctcggcctcccaaagtgctgggattacaggcctgagccaccgtgcctggcctgcttgttgttttcatctcatcctgatttctgaatacaggagaggagctgagttggtgttcactaacaagcacagaagctttgttacatttacagtgtcattcttggcaaaacctgaatggtatgtttgtggggtgatgaggttcagtcccctgtgacctgtgcatctggccaacactgtggtgacatccttaggaatccatggggagagacaaagcattcaggagttagtgggtcacgtttgacaagggccaataaagaaatatgcaaagacaaaaaacaagaagaacattatcatattttataccttttgtttatataaatttatgtcaatgattctagcttatgttaatatacaatgtatacaatatgctaacatatacaatatatgtttatagtttaaacatttctgtcatgttttcagattctttaaagattacattacacttcctatttcagatagctgtttaaaatgagtaaggaaaaacggatgtgtgcatcagttctaactgtttatggactaaaactagttgatttcttggttaagaacaaaaagtgacaacctaattaactgaaaattttaagtaggcaattatggttttagctttaatgtaaaatattaactatgctccattcttgcatttttaacctaatactcaatataaatcgccacatgccatgtttcagatcaaggttctacttgtgatctctcatgagtttttcaaggttttaattatctgagatgtaacaatgtacccataaccttactggcttaaaccaggaatttattctttttacatgtcacaattttctgggtcaagacactggacagagcggtgtgggttggttgcttcatgatgtccctggtctcatctggaaggactctagtggctggagatgtgaagcaggcacccagaaggactctagtggctggggacatggagcaggcacccagccctctctttgtggccagcacggacttccttccagtctggtagcatcaggtagtcaggtttgtctggcttctcccagggtgtgtgtccaagaggcccaggcagaagctgtaaggtctctcatgatcatccctcagaagtcccagagcatctctcctgccacactgtccagttgtactcatcactgagaccagccatgattcaagggggaaaggtgattagattccacctcttgatgagaagcatagtaggaacctgcagcagtctttaataaaccacagcttgtcctctggccacaaactattaacgtttctcccacatgcaaattatgctttgcccctctcaagagccccagaatggttttccttatggcactggctagtagcccaactgaatcctgaatcaggttgtggtggcttgtcatctgcacccacacacactcagctgcagtgaggactgaatcaggttgtggtggcctgtcatctgaccccccacacacagccacagtggggactgaatcaggttgttgtgagctatcatctgagcccacaaacttagccgcagtgaggggactgctgtgaaaacagtcgacatttccctttagaagctttggtgggaggcaagagggaagtgctgccctgcaggccccgtctaacagttggtcattcccatggggcgcctgttacagttctgtgattagtgcccagtcctggtccctgaaaacggcgcccagtcctggtccctgagaatggtgtttgtgtccttttactcctccctctgggcttttgtcattctccatgttctttttccttcagtgcctgggttgccgttgaccagctttccctgcctttttcttatggtcaatagggtattcaatggcttctttttcattttttttccttttcttttcttttctttttttttactttggccttttgagacaagaaattatttctttatattttctctaaattctgtttgaaaactgaaccttcttctttagatcatgtccctctcctgtcatatttattcagtgacagttaggggaggctggtagcactttccatgttcttcccagatgtctccttaggcagatccctgagatggtgcagtgccctttcagtttccatgttgtggccatagttttcccacagtccctcagcaagtaactctcagaccttttctccagtttccaatgacattttctcaccgtccttcaggccctgaccaagagtcttgatgcccttccaggttgcatgaatggtctccttgaggcccagttacaggtcagcctcacagtcgtgtcacatattgtagcttctgattaccacagcagctcatttccagctgccatattctgttccagttatctattctgaagtaaaacaactcattattacttgttttttggcttagagagtcttggtggccagctcatctcacacacagttgcagccaagctggattgtgtgaaagcacagtggggtggtgtgcagggtggctcactagtggttgggagtggatgttgctggaggctcactagttgttgggagtcggtgttgctggaggctcagtgggggatgtcaatgcgtgtagctagtcatggactggccttgtggtttccatcatgaggtctcaggggagtgggatttcctgcctggtg

SEQ ID NO: 2635 - DNA, 6200 bp, Homo sapiens
  misc_feature (1)..(6200): DMR21:9673401
tgtgtagcttaataaaagataactgtactattctgtttctgcatttaatctgttatgaagtcacctatcatgaatcttctggaaaattccacgtatatttgtgagagaatgagggtaaaaatggcgaataacatattagtattattataaaagtcattttggcctcctgttgccactgaaaaagtctcaggatgtcccaggggactttggcccacactttgagaatcaatgttcaggctcctttctgagctgattatgtagctgagcacgttgaacgtcatgtgattgagaacctgccccttccagccttcatctcttccattagcttccctaaaccattcattttttagggcattattttctatcaaatacaaacaccagtggaagagagaacacatgaagccattagtagtttaatgccttaatgtgaataaatttacttcatttcaatttgagagtccatggggtcacaaaggagatgaaagagaaagtacaagagccagacataaggttggaaagaaccctgtccccagtgaaaggccaattttttctttcacagcatcatcttggaacaacctgctttctggattcttagctcacaagtttgaaaaggagccattccctgatctattttaattgcttatcttcaaaaactatctgaactaaggtaccctgtggctactaccttccaatttaggactcaggtttccaggaaaagaaaagagttacaactactaataaaagtcagtcaaagtaactgctcctctttgaaagtctcagctcttattttagatatgggggttcacatgcaggtgtgttacatgggtgtattacacccagctagtgagtattgtacccctgggtagtttttcaatgcatgcccctcccttctttgccccccgcagtccacagcgcctgttgttcccatgtgcacgtccatgtgtgctcaatgcatagcttggagctcccacctataactgagaacatgcagtgtttaaatcccactaatttctatgaaaaagtatttctgttgataaccctgcaggaagctctttattaatgtcttcatcctttaaacctacttagccctatgctgctttagtcacctgtacttttttaaaaaactatttttttctctcattctgacttacttatccttacatgcattgctatttcttcattcctaaggaagtacgcattcgatttaagcatctgtgctaagacatccttggaaattaaattctagtcttttttaatggggcaaaatggaaatataatctcaggtaatgctttccagttcagcttactgctggtttttgcagatggaattataaacatacttaatcagagggaaattccaataaactttagccacagtatattcgtgcctttgcatgggaagagttgatctctcctcaagctagctgcagcctgcgtcttctgagggaagagctgtcttcacttgcgtgggatgaatttgagagatcactggccttgccgtctgagagtgcggtccctgagctgggaggattctgccgagattaggtcatgcaatcagcctgaggtgccaccatgggggtgagctcaaattatagttttgggaccatgcctgagtttagtcagcaaaagtaattcacaccagagggggaatgtgcaagaggtcaataacagaatgagaaatcaggggcagggaaaatgcaggttgtgaaagacgatgaagtgatgattagaggcaggctagggtggcctaccaatggtgaagtcctgggagtgaagaagacgtttgcttcataaataaagaaagacttctgtgctgcaggagaatcaactgttgagaggggtgaatggatgcagagtagtttccctgttaccacgtccaaacagatgtttatttgctggtaactgccatttcaaaaataccaccggaatactcattatttaaatgtttttgttacaccacaactttggaaaacatctctaagccaggcatataagccaaggttacatagtatgtcaggaaaggtataaccattaaattaattaactgtgttttgtctatgatttttaagaaaaaaatctatattttctgcgagtagtgagcaatacttatcaattggttagtcacttgtgtctgcgagtttcatcaccagcatgatcggaaaggtatctcccctcagcttcatttgcaaggaggcctgagtcgctctcagcctcccccatttctgtgctgcagcttctggggagcccctgacaccacagaccccagagcagcccctgccgacagcgtgcctgctccggacaatcccgagctaaggatctgttagtattaactgggattttctgtctcgtataatgcatggagcagtgtttcttaaattcattcttaaggaatgaatttgtgaagaaaatgcacagctgccccaaacactgtaggcactgaacgagcactcatggcttctctctttgcagaaatctctgtggactctcctgttcgtgggaggagtgcctttttctagggtgcagtggcttcctctccatgctcagctcgcacactcctggctctgcctctgccctccggccaccggtcccccagtcgtgccacatccctgctgcctgaggggatgcttgcacggctccctctgccgggactttccacctatatgctcggccttgacccctcactcacatacccttttcttcacaactctttcctgactctcaacaccatcctacactcacagagtactgcatgcctttctgacatagccgtgtgtcagtgtgctgtgggaagtgttttcatgtgtatatgactatttgcatgttatagcagtgtgtcagtgtgctgtgtgactttggtgtatgtgactatttgcatgttacagcagtgtgtcagtgtgctgtgtgaagggttttcatgtatatgactatttgcgtgttatagcagtgtgtcagtgtgctgcgtgacgtgttttcatgtgtatatgagtatttgtgtgttatagccatgtgtcagtgtgctgtgtgttttgtttatgtgactatttgcgtgttatagcagtgtgtcagtgtgctgtgtgaagtgttttcgtgtatatgactatttgcgtgttatagccgtgtgtcagtgtgctgtgtgaagtactttggtgtatgtgactatttgcatgttacagcagtgtgtcagtgtgctgtgtgaagtgttttcgtgtatatgactatttgcatgttatagcagcgtgtcagtgtgttgtgaagggttttcatgtctgtgactatctacatgttacagcagcgtgtcagtgtgctgtctgaagtgttttcatgtgtatatgactatttgcgtgttatagcagtgtgtcagtgtgctgtgtgaaggactttggtgtatgtgactatttgcatgttacagcagtgtgtcagtgtgctgtgtgaagtgttttcatgtgtgtgactatttccgtgttatagcagtgtgtccgtatgctgtgtgaagtgttttcgtgtatatgactatttgcgtgttacagcagtgtcagtgtgctgtgtgaagtgttttcatgtgtatgactatttgcatgttatagccgtgtgtcggtgtgctgtgtgaagtgttttcatgtgtatgactatttgcatgctatagcagtgtgtcagtgtgctgtgtgacgtgttttcatgtgtatatgactatttgcatgttatagcagtgtgtcagtgtgctgagggaggtgttttagtgtatatgactatttgcatgtcttctgcacactagatggagtgcagagtgtgttgcctgtttttctccaccgctccatcctcagtgcctgctacagtgttggacacacagtaggggttcagtaaatgctaatgaacagttgattaaatgagcaaaaacctttattgaatacctaccatgttccagacatggctaactgatgagaatttaccaattacatgcttgctgccttcagggagctcaacctcacaagacagaccgtcatgtagagacaactgctacacaacatgggaagaactgctagagatgtaaagatgtaaagacccaaaatgaagaagccagaacacatgaacacaaaaccagccaaccaacaaacacaagcagcatggagcatagagtctggggaccaactgcatggtgctgaggaatgcaggtggaggcagagtggaaatcacctgagtttccatcaggcagagttgcacttgaatttgagttctggcacttgctgagcctctctgattctgtcttctgtaaaataggagtaataatatttatttatatctaccgtacaggcaattgtgagatttacttaagacatactgtcttagtccatttttctgttgcttataacagaatacctgaaactaggtgacttatttttaaaaagcttatttcttagagttacgaaggctgagaagtccaaggatgggggtctgcagctggtgagggccttcttcctgacgggaaatcagaagagccctaaggtggttcagagcaccacatggcaaggggccgaggatgctagcgtgttagctcagatctctcttcttcttataaggccactagttcctctcccatgataacccgtttagccattaacccattagttctttaatccatgagtagattgattcataaggggataacccctgtgatccaatcaccacttaaaggacgcccctctcaatactcccatatcggggattgttgcaacacaaattaagatggcctattagatatccttaatcttacatcttaaggtgttctgtgatgttgcagttcaaccccctctcattcctctctactcttttagcagttacaaacaaacaaactcaccaaagaaaacaccagacaaacatacatccaatagtattgtgtccggaattggtgggttcttggtctcactgacttcaagaatgaagccacggacccttgcggtgagtgttacagttcctaaagatggtgtgtccagagtttgttccttcagatgttcagatgggtccagagtttcttccttctggtgggtttgtggtctcactggcttcaggagtgaagctgcagaccttcacagtgttacagctcataaaggtagcatggacccaaagagtgggcagcagccgccaaagacggtgcagacccaaagactgagcagcagcaagatttattgcaaaaggcaaaagaacggagcttccacagtctggaaggccctagccggttgccactgctagctcaggcagcctgcttttattcccttatctggcccaacccacatcctactcattggctcattttagagagagctgattggtccattttacagaaacctgattgggctgttttacagagagctgattggtccattttgacagagcactgattggtgcatttacaaacctttcgctagacacagagcgctgattggtgcatttacaatcctttagctagacaggaaagttctccaagtccccaccagattagctagacacagagcgctgatcgatgcagttacaaacctctagctaaacagaaaagttctccaagtccccacccgacacagaaacccagccggcttcagctctcaatggcacttgccctgagactttgcggcacctagcctgggtgctccggcagcctagtaggcaccggccggccacaccgagtgtgggcccctgagcctgcacccacccggaaccagcactggcccgcgagcatgcacagccccgctcccgcctgcgcctctacctgcacacctggtggggagcagagggagccgccgggcctccgccagccccagagaagggcccccacagcacagcggcgggctgaagggctcctggagcactgccagagcggttgctgagagccagtgagggctgctagcacgttgtcacctctcagtattaacaatacaaatacttttttgtcttatttgtcctttgacttatttataaccaaccgaatgtagagaaagtgatgctgatgttgagtgactctggaggctagaccagaaaatgttgaagagtatcagaatatacaaccctaatatatgttacttttgcataaattttatttttaaaatttttaatttttattttaagctgaaggcaattgagaaaaagaagatgcgagaagagctgtttacccttcctttatctgcttaaaagcaaggaataaatttccatta

SEQ ID NO: 2636 - DNA, 600 bp, Homo sapiens
  misc_feature (1)..(600): DMR21:9712601
tttgcataataagattagggtgggactaccagcctttcccgcctgctatgtaaacgtcccacctggtcaagccaatccatgagccctagggaaagcagacaccacctcctcaagcctgcctataaactctgctgtggtctgacactgtccccctttctgacacctctctctcacaaggagctgctctcctctctcctttcttctgcctattaaactttccactccttaacccacccacatgtgttcatgtccttaattttctcagcacaagaggatgagcccctggtacttaccactgacaatgatgctgcttcacatataatgtaaatatatatttaataacctacatatttctacatatattgatgtgtacacacacacacacacacacacacacacactcaaatgtgggccattacagatgttaatttctaaaagaatggtgcagacaaatgccgcgattgaggagagagtgctttgagcttggggctggacaggcttagcctggcacgagcacttgcagccttgcactgaggaatgggaagtccccacagactgaaaatcttcagggaggacatccttaataagttcagccaactt

SEQ ID NO: 2637 - DNA, 2300 bp, Homo sapiens
  misc_feature (1)..(2300): DMR21:10413001
ctttatgcaatgacttctccggctcgccatccttttttccttttggcactaaccaccctctttacccttccatctatcccaaaactattttccccttcctacctttccagccacactacagtgtctgtcgccaccaactgcagggaggccagccacggtgcagcaggctacagcctccagtctgtcctggtcctctaagccgggctcggagcagctcggtgagcagacacagaagaacctggaacagcctgactcttcttcagccccatttatgtactgaagttatgcatatgcggttcgtggactacactttccaggattggataagagaaagcccggaggcctactctgattggactttgttatcatgttctgattggatgaaagtcttaggacaaccaattagagtatgaaaataaagtccaatcagagaaggcctagagattttctctcacccaatcagaacatgtagtccagaaaccatgcgcgtaaccccatgtgcatgccgagcaggcctcacgccagtttagggtctctggtatctcccgctgagctgctctgttcccggcttagaggaccaggagaagggggagttggaggctggagcctgtaacaccgtggctcgtctcgctctggatggtggtggcaacagagatggcagcgcagctggagtgttaggagggcggcctgagcggtaggagtggggctggagcagtaagatggcggccggagcagtaagatggcggctggagtggtaagatggcggctggagtggtaggagtacagcctgagtggtaggagggtggctggcagctggagctgctcttgaccggctagagatctaggagaaggtggggactgtgcccaacgctggaggctgcagccttggccaccgcggctcgcctggctacggttggtagtggtgacggagactgcatctctgttagagtagtagaaaggtggcagggtaggtgtgctctctgcggctgcactgcctgcttgcggggtggtgggggagcgggtttggtgtgcttttggagctgcactccctgccgtggggggctggtgggtggcactatcaggtgttgaattgctggcagtggggcaggtttgctgcgctatcagagtctacactgcctaaggtggtggggggttggaggcaggttgtgtgtgccgtcgtgcactgccagcggaaggtggtggggaattaggggcattattagctgctacactggccgatgcagggggcgggttgggtgagctatcatgagctacaatgtcagcaacaatgccaactggcaggcagtcgggggtgctttaggggagctgtgaaatgttgcattgtccatggaggaaaggggaacttctgctcgtgttggaacgcggagggtgcacagagtttttgtggcaatcctctgaccaccgcagggccctcacacccaccatggttacccggcccttgccctcttgctctgtgttgtggggaccatctgggagccccaggcatggagtagtgggcaccatgggggctcagggtcctgtgggtggaggagtcaggaatgggaactggtacttgggtggggaggactggctgggtctgagtttctgctgttcttgctccccaactagcctcggacactgtggtgtctccagtccccaccccaggtcaggaggccagcttggtctaggaggagaggctggactttggagggtgggtgtgagtgccttcgctgaaactggccccagccacccagtgggcagcatgacagggtgaggctctaacactgccactttctgcatcctattgtaggtttttctggcattgtctgcccagctgctccaagccaggctgatgaaggaggagtcccctgtggtgagctggaggttggagcctgaagatggcacagctctgtgagtttcgttcttgttgcccaggctggagtgcaatggtgcaatctctgcttgcttgaacctctgcctcctgggttcaagtgattcttctgtctcagcctcccgagtagctaggattacaggcaggcgccaccatgcccggctaattttgtatttttagtagagatgaggttttactgtgttggtcaggctggtcttgaactcccaacctcaggcgatccacctgcctcagcctcccagagtgctgggattataggtgtgagccaccatgcccagctgcaactcttctttttacctttccttttccctttatgtgcttacatctgtcatttctaacattgacattgtcaaggttgagaacagttatgcactgtattgtactccttact

SEQ ID NO: 2638 - DNA, 32753 bp, Homo sapiens
  misc_feature (1)..(32753): DMR21:10652801
gtccactccattccattccattcctttcgagctcattcaaatccactagtttcctttcgattccattccattccattcaactccatttcattccaatacattccattccattcgattccattccattccattacattccattcgattcaagtcaattcagttccattccattccatttgagtccattccactccattccattcgagtccattccaatccattccattccattcaagtccattccattctattccattcgagtccattccattgcgttccattctagtccattccattccattccatttcattcgtgtccattcagttctattgcatttgagtcgattccattccattccattcaaatccattcaattccattccattccattcctgtccattccattctattgaattcgagtccattccattccattctattcgagtccaatccattccattccattcaattcgagtccaatccattccattccattcaattcgagtcgattccattccattccattccattcgagttcattccattcaattccagtccattccatttcattccattccatttgagtccattccattctattcctttcgagtccattccattccattccattagggtccattccattaaattccattccattccactcaattacaaagcaatccactgcattcgggtccattccattccattcattccattgtggtccattccattcaattccatttgagtcaatttcattccattcctttggagtccattccattgcattccattccatcactttcgacaccattcaattccattccattcagtttgagtctatttaattccattacattcgagtccattcctttgcattccactccattcgagtacattccatggtattccatttgaatccattccattgcattaaattagattccattccattagtgtccattccattaaactcctttccattccattcgagtcaattccattccattcgtgtcagttccattccaataccttcgagtccattacattaaattccattcttttccattcaagtcaattccattccattccattcgggtcaattctaatccattgcactcaattccaatcgagtgcagtccatgccattcgagtaaattagatttcatttcattccattcgagtcccttctattccattccattccattcgagtcccttccattacattccattacattcgagtccattccattccattccattccattccattccattccattccactccattccattccatctggggccattccattcgagtccattccattgcattccataccattcgagtccattccattccattccattcaactcgagtcgattccattctatttcattccattcatgtccattccattccattcgaggccattccatttcattccattcgagtccattccattcctttccattccattccattgcattccttttgagtccattcaattcaatagcattccattcgagtccataacattccattccattccattccatttttccattccattacattccattccattcgattccattccttcccattcgagtccatttcattacattccactccattccatcctagtacatttctttctgttacattccattgcagtcaattccattgaattccatttcttggcattcgagtccattaaactccattccattcaagtccactccattctactccattattttcgagtccattccattcgaatccatttcatttcactccattattttcgagtccattccattctattctattcgagtccattccatgccattccattcgagtccatttcattccatccattctgttccttttaggtccattcaattccattgcattccgatcgagtccgttccgttccatgcaagtccattcgattccattctattccatttgagtccattccactctattactttcgagtcctttcccttccattccattctattcctttcaactccattccattgtatgaatttgtattccattccagtccattccattccattccagtccatgacatacgggtccatttcatttcattccattccattcgggtccatttcattccattccacaccattcttgtccattcaattttctccattccattcgattccattccattcgattccattcgagtcctttcaattccattgcactcgagtccattcaattccattccatgctattccattcgagtccaatactttacattccattccattcgagtaatttccattccattcgagtccattgccttcaattccattggagtcctctccattccattctattccatttgagtcctttccactccatatattctagtccattccattcaaaccccttccattggagtcaattccattccattccattccattctattccattcgagtccattcctttccattccattccattcgagaccgttccattccattggagtcaattccactccattccattggagtccattccattacattctattccaattgagtccattccattccattcctttcgagtccattccattctattcaaatccattccattccagcccattccattcgagtccattccattccattccattcgaatccattccattcgagtccattccattccattcaattcgagtcattagattccactccattccattccattcgagtccattccattccattccattccattccgttccgttccattccattccattccattccattccattccattccattccactcatgtccattcaattcaattccattcgagtcaattccattctattgcattcgagtccattccattctgttccattccattagattccagtccattccactcaattccattcgagatcattccaaaccattccattccataccattccattccattcctttccatttgggtccattccatttgagtccattccattccttctattccataacatttcattcgagtccatcccattcctttccattccactcgagtccattccattctaaaccattctattacagttcattccattcgagtccattccattcccctccattagagtccattccattagagtccactccagtaaaacccattcaattccattcgtgtctattccattccattccattctattaaagtccattccattccattcgagtccattccattccattccattcaataccattccattccaatccattctattccattcaagtcctttccattccattccattcaattctattcagatcaattccattgtttccattcgagtccattgcattccattcgagtccattgaattccattctattcgagtacattctattccatttcgttccattccagccctttccattcctttccgttcctttcatgtccattccattccattccactccattccattccattccactccattcaattccattccactccattccattcaattccattccattccattccattccattccattccattccattagagtcgtatcctttccatgccattccattagggtaaattccattctattccactcaattccattccattgcattccatttcatttgagtccactcctttccattccattcaactcgagtcgatttcatttcattccattccattcgagtccattccgttccattcgagtccattccattccattccattccatttaacttgagtcatttccattaaattccattcctttccagtccattccattccatttgactccattccattccattgcatttgagtccatttcatttcattccattccattccattccattcaattccattccattcgagtccattccattgcattccattccattcgagtccatacctttctattccatttgagtcaattccattccatgcctttcgactacattccattccactccattccattccattccactcgagactgttccaatccattccaatacatttgagtccattctattccattcgggtccattccattccattcgagtccaatctctctcatttcattccattcctttcaagtccattcaattccattccattccatttgagtccattccattccactccattccattccattccatttcactccattacattcgtgtccattccattcgagtccattccattccattcatgtcaactcaattccattccattccatacgttccattttatgccattccattcgaatgcattccattctattccattcaaatgaattccgttctattccattcgagtccattccattcctttccattcgagtctgttccattccgttcctttctattcctttcaagttcattcctttcaattccattccatttgaaggcattcccttccattcgagtccattcgaatcctttcccttctatttcatttgagccattccattccattccattagtgcccattccatccagttccattccactcgaacccatttcattctgttgaaatccattcaggtccaatcaattcaaatccattcgagtcaattccatttgagtccattccatagcattccattccgtttcactgaattccattccattcctatcgaatcaattgcattcaaattcattcgagtccattgcattctattccattcgagtccatccctttccattccattagggtccattccattaaattccattccaatccattcgagtccattccattccattctattccactccattccattccattccatccctttcgattccattgcattctattcgcgtccattccgttccattccattccattcgggtccattctattccattccatttgattccattccactccactgcatttcattcgagtacattccattccatttcattccattctatagaattccattcgactccattccattccattccattccatagtcaacttcatttccttacattccattccagttgagtccattcaattccattccattcgagtctattccactccattccacacaagtccattccattccacaccattccattcgagttcattccattcgattccaatccagtatattccattcaattccattcgattcaagtcgattcaaatccattccactgcattcaaatccattcgattccattccattccattccattccattctagtcaatttcattcctttacattccattccagtcgagtccattcaattccattccattcgagtctattccactccattccatacaagtccattccattccaaaccattccattcgagttcattccattctattacaatctagtagattccattcaattccattcgattcaaatccattcgaatccattccattgaattcaaatccattcaagtccattccattccattcctttcgagtccattccattgcattccattccattcttttcgagtccattcaattcgattccactcctttgaagtccattcaattccattccattccattcgaatccattccattccattccattcaaatgcgttccattccactacattccattcgaatctattctattccattccgttcgcatccattccattcgagtccattccattgcattccattccattcgagtacattccattcttttccatgcgagtccattactttctattccattccattagattccattccattaaattccattccattcctttcgagtccattccattcaaatccattccattccaatccattccattccattcccaacaagtccattccattccattccattccattccattccattccattccattccattctattccattcaagtccattccattccattccattccattccattccattccattccattccattctgttccatttcatttcattccattccagcacattccattccattcgagtccattccatttcattccattctattgctttcgagaccattcaattccattccatttcattcgagtcaatttcattcgattccattccattgcattccattccattggcgtccattccgttctatcccatttgagtccattcctttccattccattagattccattccattagagtccattacattaaattatattccattccattcgagtccattccattccaaaggagtatattccactccattgtctttgtatccattccattccattacattctattccattcatgtcgattccattccattccctttcattccattaaatttcattaccttacattacgttacattacattacattacattacattacattacattacattacattacattcgggtcctttctattccatttccttcgagtctattccattccattgcattccaatcaagtccattcaattccattccatttcattcgattccattccattgtattcccttcgaatccattgcattccattccattagagtccattccattaaatcacattctgttcctttcaagtccattccattccactccaacgtactcaagtcatttcaattccattcgagtccattcctttccattccattccattccactggattctattccattccattccattccattccattccattccattccattcgggtccattccatttcattcgattccactccgttcccttccattccattcgagtccatttcattccattccattcctttcagatctattcaattcaactacattccattcaaattcattccattccattccattccattccattccattccattccattcgatttgggtccattcgattccattccattcatgtccattctattccattcgagtccattccattccattaattttggtttcattccattccattccattcaattccgttagagtccattccattccattccataccattccattccattccatttcattccattccgtgccttgcaattccattcgattccattccattcgggtccattcaattccattccattagggtccattccattccattccactccattcgggtcaattccattccgttccattccattcgattccatttctttccattccattccattaaattcgggttaattcaattcccttccattcgagtccattccattccattccgttccattccattccattccactccactcgattccattccacttgaatcaattccattcgagtgaattcctttccattccattcgtgtacattccactccgttccattcaattagagtttattccatcccatcccatttgagtccacttaaatccatcccattccattcaagtccattccattttaatccattggagtccattccattgcattccattccattagaatccattccattatattacattcaagtccattccattctgttccattacaatcgtttccagtccattccattcgagtccattccatttcattccattcgagtaaattccatttcattccattccatttgagtcaattccattccattccgttgcattccattccattccattccattccactgcattccattcgtgtccattcctttcccttccattcgagtccattctacttcattccaatccattccattccatcccatttcattccatttgagtcaattccattccattccattgcattgcattccattccattccaatcaattccattcaattccattctattccatttgagtccattcaattgcattccattcgagtccattccattcctttcctttagagtccattccaataaatacaattctattccattcaagtctgttctattccattccattccatttgtatccattctatttcactcgagcccattgcattccattccattcgaggccattccattccattccttactattccattcaagtccattccatccaattccattgcattccattccattccattcaattcctttccattccattccattccttttccattccattccattccattccattccattccattccattccactacattccgtttgaatccattccattccattccgttcgagtccattccattggaatccattccattgcattccattccattcgagtccattccattcttttccatttgagtccattacattcgattccattccattagactacattccattaaattccattccattcctttcgagtccatttgattccattcaaatccattccattccattcccatcaattccattccattccattccattctattcaattctagtccattccattccatttcattacattccgttcctgtacattctattgcattttagtccattccatttcattccattctattcctttcgagaccattctattccattccatttcattccagtccattccattcgattccattccattgccttccattccattggcgtccattccattctatggcattcgagtccattccattacgttccattagagtccatttcattaaattacattgtattccgttcgagtccattctattcaatttcattccattcgtgtccattccattccactcgaatccattccattccgttacttttgagtccattctactccatccaattctattccaatcaagaccattagattcccttccattccattgaagtccattccactccattccattctagttcgttacattccactccattccattcgagtccattcctttctactccattcgagtccattccattatattccattccattccattccgttctattctgttcgagtctgttccattcccttccgtttgagtccactcaattcctttcgattccattccattccattgcattcaaatccattgaattccatgctattccatttgattccattccattccattccattagagtccctttcattcaaagcaattccattccattccattccattccattccattccattccattccattccattccattcgtctcctttccataccattccgttccatttgagatcattccattccattccattccattcgggtccattccattcaatgccgttcgtgtcaattccactcaattaggtacgagtccattccattgcattccattccatcgagtcattgcattccattccattcgagtccattccattgcattccattccattcctttcgagtccattcaattccattaaattccattcgaatacattacattctaatccattcgggtctcttccattcgaatccattccattgcattccattccattcaagtcgattccattctattccattcgagtccgttccattacattacattcctttaaattccattccattaaattccattcctttccttttgagtccattccattccattcaaatgcaatccattccattcccattgagtccattccattccattccattcaattccattccattccattccattccattccattctattccattcaagtccattcctttccatttcattccagtccattccattccattccattccagtccattccattccatttcattcgagtccattccactgcattacattccattcctttagataccattcaattccattccatttcatttgagttcattccatttcattccattccattgacatcctttcctttctattccattcgattcaattccattccattccattagagtccattccattaaattccattggattccattcgagtctattctattccatttttttattcatgtccattccattccactcaattccattgcattccattacttttgtgtccattccattccattcaattcttttccaatcaagtccattagattcctttccattccattcaagtccattccactccattccattctagtccatttcattccactccattccatacgagtcccttccattctactccttttggttccattccattccattgtattccatttgacaccattccattcccttccattctgtttgagcgcactccattcctttcaattccattccattccatggcattcgaatccattcaattccatgctattccatttgagtccattccattccattccattagagttcctttcattcaaagcaattccattccagtccattccgttccattactttccatcccattccattcgtctccattccataccattccattccatttgagctcattccatcccattccaatccattcgtgtccattccattcaattgctttccagtcaattccattcaatgccatacacgtctattccgttgcattccattccatcgagccctttgcataccattcaattcgaatccattccattgcattcctttccattcctttcgattcctttcaattcctttccattccattctaatacattacattctattccattcgagtccattccattcgaatccatttcattgcattccattccatttgagtccattccatactattccattcgagtccattccattaggttcatttcctttagattccattccactcctttcgagtccattccattccattcaaattcattccattccattcccatccagtccatttcattccattccattctattccattcaagtccattcctttccatctcattacattccaatgaagtccattccattccattgcattccagtccactccattccattccattcgagtccattccattgcattcaattccattgtcatccattgcattctattccattcgagtccattccattgcattccattccattgtcatccattgccttctattccattagagtccattccattgcattccattccattcctttcgagtcctttcaattccattaaattccattcaaatacattacattctaatccattcgagtccattccattcgaatccattctattgcattccattccattcaagtccattccattctattccattcgagtccattccattacattccattcctttagattccattcaattaaattccattccattccttttgattccattccattccattcaaatccattccattccaatcccttcgagtccattccattacattacattctattccattcaagtccattccattacatttcattccattccattccattccattcgagtccattccattgcattccattccattcctttcgagaacattcaattccattccatttcaattgagtccattccattgcattccattccattgacatccattccattgtattccatttgagtccattccattaaattccatagtattccattcgagtccattctattccatttttttccattcatgtccattccattccacttgagtccattgcattccattacttttgagtccattccattccattcaattcttttccaatcaagtccactagattccattctattccattcaagtccattccactccattccactctagtccgttacattcctctccattccataaaagtccattccattctactcctttcgattccattccattccattctattccatttgagtccattccattccattccattagagttcctttcattcaaagcaattccattccagtccattccgttccattactttccatcccattccatttgtctccattccataccaattcattccatttgagctcattccattccattccattcggtccattccactgaattgctttccagtcaattccattcaattccatacacatccattccgttgcattccattccatcgagtccatagcataccattccattcgagtccattccattacattccattccattcctttcgcttcctttcaattcttttccattccattctaatacattacattctattccattcgagtccattccattcaaatccatttcattgcattccattccattcgagtccattccatattattcagttcgagtccattccattagattccattcctttagatttcattccactccttttgaatccattccatttcattcccatcgagtccatttcattccattccattctattccattcaagtccattactttccatttcattacattccaatcaagtccattccattacattccattgcactccattccattccattcgtgtccattccattgcattccattccgttcctttcgagtccattcaattccattaaattccattcgaatacattacattctaatccattcgagtccattccattcgaatccattccattgcattccattccattcaagtccattccattctattccattcgagtccattccattacattccatttttttagattccattcctttaaattccattccattccttttgagtccattccattccattcaaatccattccattccattcccatcaagtccattccattccattctattccattcaagtcccttccattccatttcattacattccattccagtccattccattccatttcattcgagtccattccattacattccattccattgctttctagaccattcaattgcattccttttcattcaaatccattccattcgagtccattccattgcattccattccattgacatccattgcattctattccattcgagtccattccattagagtccattccattaaattccattgtattccattcgagtccataccattccatttttttttccattcgtgtccattccattccatttgagtccattgcattccattacttttgagtccattccattccattcaattcttttccaatcaagtccattagattccattccattccattcaagtccattgcactccattccattctagtctgttacattccactctattccatacgagtccattccattctactcctttcgattccattccattccattctattccatttggtccattccattacattctattctgcttgagtccactccattcctttcaattccattccattccttggcatttgaatccatcctattccatgctattccatttgagtcattccattccattccgttagagtccgtttcattcaaagcaattccatttctgtccattcttttccattccattccatctcattccattcatctccattccataccattccattccatatgagctcattccattccattcctttcggatccatttcattcaattgctttccagtcaattccattcaattccatacacgtccactccgttgcattccattccattgagtccattgcataccattccattcgagtccattccattgcattccattccattcctttcacttcctttcaattcctttccattccattctaatacattactttgtattccattcgagtccattccattcgaatccatttcattgcattccattccattcgagtccattccatactattcaatttgagtccattctatttgattccactccttttgagtccattccattccattcaaatccattccattccattctcatcgagtccttttcattccattccattctattccattcaagtccattccattccatttcattacattccaatcaagtccattccattccattccattccagtccattccattccattgcattcgtgtccattccattgcattccattccattccatttgagaccattcaattccattccattccattcgagtccattccattgcattccattcgactccttttgagactattcgattccattccatttcattcgagtccattccatttgagtccattccattgcattccattccattgtcatccactccattctattccattcgagtccattccattccattaaattagagtccattccattaaattccattgtattccatttgagtccattctattcaattcctttccattcctgtccattccattccactcgagtccattccattccattacttttgagtccatttcattccattcaattcttttccacacaagtccattggattccattccatttcattcaagtccattccactccattccattctagtccgttacattccagtccatttcaatgcagtccattccattcttctccattcaagtctattccattccattccattcgaatccattccattccattccattccattccattccattccattccattccattcctttccgtttgagcgcactctattcctttcgattccattccattccattgaatttgaatccattcaattccgtgtgattccatttgattccattccattccattccattagagttccttccattcaaagcaattccattccattccattccattccattcatctccattccataccattacattccgcttgagctcattccattccattccattcgagtccattccattgcattccattccattcgagtccattgtagtccattccattcgagtcccttccattgcattccattccattccattcgagtccattccgttccattctatttcatttcattccattccattccattccaatgcattctattctattccatttggatccaatccattgcatgctattccattgcattccaagcatttgagtcctttccattccatgctgttccttttgagtccattccattccattccaatcaagacgattcaattcgagtccattccattaaaatccattcgaatccattccattccattccataacattcgagtccattcaattccattccattcgagtccattcctttccattacattacactaatttccaatccattcaattccattcgagtccattccattccattccattcgagtccattccattgcttttcattccaatgccttcgaatccattccattccattccattccattccattccattccattccattctagtccattcaaatcctttaaatttgaatccattacattgcatagcattccactctagtccagtccacttcattccatccaagtccacaccatttcattccgttagagtccattccatttaattccgttgtattccattcgagtccattccattcaattcctttccattctattcgagtccattccattccattccattccattccattccattcgagtccattccattccattccattccattccattccattccattccattccattccattcaggtccattctattccattccattcgagtccattccaatccatttctttcaagccattccattccacaccattccatttgagtccattacattctattccactcgagtccattccactcaattccatttgagtccgttccattgcattccattccattagagtctattccattccattcaatttgtgtccgttccattccattccattccatttttttattccattcaattccattccattcctttccagtccaggtcattgcattccattcgagtcttttccactccattccaatccattccattcctttcgagtccattccattccattcgactccattccattccattgcatttcattctttcgagtacattccattacattcctttcgagtccattccattagattccattactttagattccattccaataaattccatcctgttccttttggagtccattccattccattcaaatccattgcattccattcctttcgagtccattccattgcattcctttctagtccattccattagattccattactttagattccattccaataaattccgtcctattccttttggagtccattccattccattcaaatccattgcattccattcccttcgagtccatgcaattccatttcattctattccatttaggtccatttcattgcatttcattccattccattccattccattccattccattccattccattccattccattccattcaattcctttccattccattcgggtccattccattccattcaagtccatttgagtccattccattccatttcattcgattccatttgattccaaaccatttcattcgagtccattccattctattccattcgaatccattccattccattcgagtccattccattccattccgttcgaatccattccattcctttccattccattcgagtatattccactccattcaattccattccattccatatcattccattctattctggtccattcctttcaattccattagagtcaattccattgcattccattcgagttcattccttcacattccattccattcgagtgtattccaatccattccatttgagtgtattccattgcattccattccattcttttagagtccattcaattctgttccattcctttcgagtccattccattccattccattccattccattccattccattccattccattccatctgggtccattccattctattggcgtccattccattggcgtccattccatgacattcgtgtccattccaatccattccattccactcggttccactccattccattctattcgagtccattccattccattccattccattcgagtccattccattacattctattccatttgcgtctattccattccattccattcgagtccattcctttcaattcgagtccattccattccattccattcgagtacgttccattcaagtccaatccattccattccttttgattccattcaatacaattgcattccattcgagtccattccattgcattccattcaattcaaatcctctccattccatttgggtccattccatcccattccattccattcgagtccatttcattccattccattccataccattcgaatccattccattccgttactttccattccattcgagtccattccattccagtccataccagtcgagtccatcccattctattccatttgagtccattgcattccattccattcgagtccatccattccattccattcgagtccatccattccattccattcgagtccatcccattccattctgttccgtttgagtcgattgcattccattccattcgagtcctttccattccaacccattcgagtccatttcattccaatcccttccattcgaatccattccattctattccattcgagtccatgccattcgattccgttcgagtccattcctttacattccattcgattcccgtccattccgttccatttcattccattcgagtccgttccatttcattcattgcattccttttcggtccattccattccattctagtccattccattccattgaattccacttgagtagtttcccttctatttcagtcaattctattccactccactccattcaagtccattccatttctttccattcgagcacaatccattccattccattgcaatccattccattccttttgagtccattccattccattccattccattccattccattcctttcgagtcctgtcaattccattccattcaattcgagtccattccattccattccattccactcgagtccagtccattccattccattcctttcgagtcctgtcaattccattccattccattcgagtccattccattccacttgagtctgttccattccattccattccattccattccattccattccgtttcattccatttcattccattccattcgagtccattccataccatgacattccgttgtattctagtccattcaattccattccattccaatgcattccattcgagtccattccattccattccttttgggtccattcttttctattccattcgagtcaattcctttccattccattagagtccattccattctattccattccactcgagtcaatttaattccgttatattccattcgagtccattacattcctttccattctagtccattcctttccattccattccattccactagtgtcgtttccataccattccattccattcgatttctttcccttcctttcgagtacattccattgcattccatttgagttcattccattccatttcattcgattccattccactccattccattcaattcgagtctgttccattccattccattccattcgggtccatacatttcaataccatttgagtcaattccattccattccattggagtccaagccattgcattccaatccattcgattccattctgttccattccattgcattccattccattcttttcgagtccattcagttccattccattactttcgagtccattcagttccattccattactttcgagttcattatattcctttccattcgattccattccatttcattccattccattcttttcaagtccattcaattccattccattacaatcgagtccattccattccagtccattagattccattccattaaattacactgaattccgttcaattattttccattccattcgtgtaccttccattgcattcgagtccattccattcccttccttttgaatccattcctttccataacattctattccattaaagtccattccattccataccattcaattccattccaatccattgaattccactccattccattcgtgtccattccattccattccttttgtggacattccattccattccaatccattgaattccactccattccattcgtgtccattccattccattccttttgtggacattccattccattccaatcatttccaatccattccattccagttctttccattcttttccagtcgactccattccattccattccattgcattccatttcattccttttgtgtcctttccattccatttcattccatgcgagtacattccattccattcaattcgaggccattccattccaatcgactcgtttccatatcattccataccacttgagtccattccattccattcgagtccaatccattcaattacattcgtatccattgcattccattccagtacattccattccatttatttcatgtacattcgaatcctttccattccattcgagtccattgcattctatttcattcaagtgcattaaattccttttcattagaataaattccattagagtccattgcattaaattccattccattgctttcgaggccataccattcatttggcgtccattgaattccattccattcgagtccattccattccattccattccattccattccattccattcctgttggttccattccactccattgcattccattccattccattagtgtactttccattccattccattggggtccaatccattccattccagtccactcgagtcatttccattccattccattccattggagtccattgtattcctttcgaatccattccattccattccattccattcgagtccattccattccattccattcgagtccattccattccattcctttcatttcaagtcccttcgcttcctttccattccattcaagtccattccattctattccatttgggtccattaaattccacttcattagagtccattcccttaaattccattcaattgcattcgaggacattccacacaattcaagtccattcctttccattgccttcgagtccattccattccaatccgtaatattccattcaagtccattccattccaatcctttccattccattcaattccattctattaaattgcattcccttccattccattcaatactgttccattccattccattccattctggtccgtttaattccatttgagtactttccattccattcgattcaagtccattccattgcattccattccattcctttcatctccattgaattccattatattccattctagtccattccattcgattcctttctagtccattccattccattccattcaattcgtgtccacaccattatattccactccattcgaatccattccattctattccattccagtccattccatgccattccattagaatgcattcattaaatgtcactcccttcctttggaggccattccattccatttgagtccattctattccattccactccattcgtgtccattccattccatttgagtccattccattcgagtcctttcctttccattccattccattccattcctgttgattccattccattccattccattccattccattccattccattccattccgttccttcccattccatttgagtccattccattccatttccttcaattctattccattggcgtccattccatgacattcgtgtccattccaatccattccattccactcggttccattccattccattctattcgagtccattccattccattccattcgagtccattccattacattctattccatttgagtctattccattccattccattcgagtccattcctttcaattagaatccattccattccattccattcgagtacgttccattcaagtctaatccattccattcctttcaattccattcaatacaattgcattcctttcgagtccattccattccattgcattccattcaattcaaatcttctccattccatttgggtccattccatcccattccattccattcgagtccattccattcctttactttccattccatttgagtccattccattccagtccataccagtcgagtccatcccattctattccattcgagtccattgcattccattcgattcgagtccattccattccattctgttccgtttgagtcgattgcattccattccattcgagtcctttccattccaacccattcgagtccatttcgttccaatcccttccattcgattccattccattctattccattcaattccattccattcatttccattcgagtccattccatttcattccattctattcctatcgagtccattccattccattccactgcattcgagtccattccattccattcgagtccattccattccattctattccatttcagtccattccattccattcgagtccattccattccattccattccattccattccattgaattccattctattccgtttgagtctgtcccctgccattcaattcaattccagtcaattccattccatttgagtcaattccaatgcattcctttcctttcaggaccattcctttccaatccattcgagtcccttcctttgaataacattgcttcctttcgagttcattccaatccattccattcgagtccactccgttatattcctttccattcgagtccattccattctcttacattcgagtccattccattccaatcctttagtgttcattccattaaattccactctattccatacgggtcaaatccattccattccattccattccattccattccattctgttccattgaagttcattccattcaataccattccattccattccattccattccattccattccattccattccattccattccatttgggtccattttattccattctcttcgagtccattccattcaattccattctgctcgattccagtcaattccattccattgcatttgagtccataccattcaattccattccatttcattcgggtccattccattccgtcccatttgagtccattccattccattccattccattccactcaattcgttacaattctaatccattacattccattctagtccattcctttccattcgtgttaattccattccataatattcgagtccatcccattacattcgagtccatcccattcctttctattcccttcccttccattccattgctttcaggtcctttccattccgtagaattccattcgagtccattccaatccattccattgtgttcctttctagtccattccattctattccattccattcgggtacaatccatcccattccattcgaggacattccattccattccactcaattggagtcaattccattcatttccattccacttgagtcgattccattccattcatttctttcaagtccattccattccatttgagtccattccattccattgcattccattcgagtccattccattcattccattctattccattccaatccattctatttcatttcaatccaatccattccattccattcgaggccattccattccaaccatttcgagtccattccattccaacccattcgagtccattccactacactgcattccactcgtttccattccattctatttcactggagttcattccattcccacccattccattcggttcatgtccattccatttcattccatttcattcgagtgctctccattccattccattcctctcgagtcgattacactccattccataccattcgagtccattctattccattcaaatccattccattccatttgatagcattccattccattccattccattccattccattccattccattccattccatttcataccattcctttcaactgcattcctttcgagtccattcctttccattccattcgagtctattccattccattctattacattcccgtccattaaattaattccattccattcatttcgagtccatttaattccattccattactttcgattccattcctttcgattccattccattctattccattcgagtgcatttcattgcattccattccattcattttgagtccattccattccattccattactttcatttccattccaatccattccattcgtgtccattccattaaatttcattgtattccattccattccattcatgtccattctattcgagtccattcgattccattcagtactattcctttcgagtccattccattccaatcctttcttttccattcaagtccattccattccgtttcattccattccattccattccattcctttccattccattccattccattccaatcctttccgctcggctaaattcctttccatgccattcgagtccattccatggcatttgagtccattccattcgagtccattccattccactccattccatttgattccattccattctattccattcgattgctttccaatacattacattctagtacattcctttccattccgttttagtccattacagtccattccatttctttccattccattccattgggaccattccatacaattccattcgagtgtattccattccattacattccagtccatgccattctattccatttgagtcctttccatttcattcccttccatttctttcaggtccatttcttttctttccaatcaattccattccattccattcaagtccattcctttacattccattccactcaagtcattttcattccattccattccattcaagtgcattccattccattccattccattcaagtgcattccattccattccattccattccattccattccattgcattccattccttttgagtcccttcgatgccattccattccagtcgagtccattccattccattcgcatccattccattaaattcgagtccattccattcgagtccattccattccactccattccattagagtccattccattacttttgagtccattcaatgcaattccttaccattcatgtacattccatttaaattccattccattccattccatacctttcctttccattccattccattctattccaatacattccattccattccattccattccattctattcgagtacattccattcccttccattccaatggagtccattccattctattccatttgagtccattctattctattccattggagtccattccattctattccactcgagtgcatttcattacattccattccattcgagttcatcccattccattgaattcgagtccaatcccttccagtccattcaattccactacgtaccatttgattccattccattccatacttgtccattccattccactctagtacttttcattccattgcattttattccattcgagtccatcccattccattccattcgagtctattccactccattcgagtccatttcattgcattccattccagtccattccattccatactcttccatttgagtacattccattccattccattcgagttcattccattccaacccatttttttcgactccattccatttcattcctttcgaatccattccattccattccattccattcgagtccatgccactccactccattccattcgagaccattccattccattccattaatttccattcttgtccattccattcaattccattcgagtcaattctattccattccattcgagtccattccattgcattccattccattctagtccattccattgcattccattccatttcagtccattccactctattccattcgagtcctttccattgcattccattagattccattacattaaatactattgtattccattcgagtccattccattccattccatttgtgtccattccattccatttgagtccgtttcatgctattccttttgagtccattccattcaaatccattctattccattcaagtccattccattccattccattccattgggaccattcccctccattccattccagtccaatccattacactccattccactcccctcccttctattccattcgaatcctttccattccattcccttccatttcattcaggtacattacattcctttccattcaaattcattccattccattctattcgagtccattccatttcattccattccactcgagtcattttcattcctttccatcccattcgagtccattccattccattccattccattcccttccattccatttgagtccatacgattccattccattccactcgagtccattccattccattccattcgagtccaatccattcgataccattccattcccttccattccattcgattccaatcgattgtattccattcaagtccatgccattcttgtatattccattccattacgttctattccatttgagtccattccattccattctattccattccattccattccattccattccattctaatctatttcattcgagtccattctatttcattccattccagtccattccattccattctattccatttgagtctattccattccattccattcgaatacattccataccaacgcgtttcattcgagtccattccaatcccttgtattcgagtccattgcattccattcccttccattccattccattccattccattccattcgagtaaattccattctttccattccattctagaccattaccttccattcgagtccattccatgccattccattccattccattccattccattccatttgtttccattccattccattccattccatttgagtccatcttattcgtctacattccattccattcgagtccattcaattctattccattccatttgagtccattccaatacattcccattcgagtccattgcattcctctccattccattcgagtccattccattttattccatttgagtcgttgctattccattccattcgagtgcattccattctgttcccttagagtctattccattccattccattccgttcaagtctcttccattccattcgagtccattccattccattgcattcgagtccaatccattccatgctattcttttgagtcctttccattggagaccattcctttccaacccattccattcaggtccattccattccattccattcgaatccattccattccattccattccattccattccattccattccggtccaatccattcaattacatttgcatcaattccatttaattccattcaagtccattccgttacaatccactccattcgagtccagtccattttattgaattcgagtgcactccattccattccattacaatgcattccatgaaactctgttgtattccttttgaatccatttcattccattcaattcaattcgagccctttccattccattccatcccattcatgtgcattctattccataccttttgagtccattctactcctttccatttcattcgagtccattccattccattccattccattaaattcgagtacattccattccattcctttcaagtccatttcattgcattatattacattccaatagagtccattcaattccattccatttgagtccattcaactccattccattcgagtccattccattccacaccattccatttgagtccattacattgtatgccattcgagcccattccattcaattccattagagtcacttccattccattcctttccagtcttttccattgcattccattgcattctattcccttcgattccattcctttctgttccattggattccattcaattggagtcctttcccttaagttccattccattccatttgagtccattccattccattcctttcgagtccattccattccattccattctattccattcaagtcctttccattcgacattattacattccattcctgtccattccattccattcgggtacattccattccattccattcgagtccattccattccattccactccactccattacattctactccattcgaatcccttccattccattcctttccattcctttcatgtccattccatcccattccattcgagcccatttctttccattccattccagtccatttctttcaattccattccattacattacattcgtgcccatattattccattccattccactcacttcttttcaattccattccactactttcgagtccattccattccatctgagtccattccattccattattttcgataccataccattaaattccgttccattcctttcaagtccattagactccattccattccattcgtgtgcattccattccattcgagtccattccatcccattccttttgagtccattccattccattccattctattccattcaagtcctttccattccacattattgcattccattcctgtccattccattccattcgggtacattccattccattccattcgagtccattccattccattccactccactccattacattctactccattcgaatcctttccattccattcctttccattcctttcgggtccattccattccataacattcgataccatttctttccattccattccattcaattacattcatgcccatactattcctttccattcctctgacttcttttcaattccattccattacttttgagtccattccattccatgattttcgacaccataccattaaattcctttccattcctttcgagtccattagattccattccagttcattccattgcattctcttccattccattccatttcattcgagtgcctccattccattctattccattcgactccatttcattccattcattccattctattctagtccattccataacattacgttccatttgattcaagtccaatcaattccattccatttcgtttgattcctttccactgcattccatttgaatccattccattgcattgcatttgagtcctttctgtttattccattcgaggcaattccattccaatccattcgggtccattcctttccattccattgcactcaaatcgattagattccattccaatccattcgggtccattcctttacattccattgcactcgaatcgattagattccattccattccattcgggtccattccattccaatccattccattcgaatccattccattccagtccattccattagggtgcattccattctattccctttgagtcaattccattcaattccattcaagtccaatcctttgcattccatttcattcctttcgagaccattcaattccattccatttcattcaaatccattccattccattactttcgtgtccattccattccattccattcgagtccattccattctattcagttcgattccattccattccattccattagattccattccattagagtccgttcaattaaattccattccattccattcgagtctattccattccattcgagtccattccactgcattctgttcgtgtccgttccattccattccattctcttccattcaagtccattgcattccattccattccattccattccattccattcaagtacattccattccgttccattccattcaagtacattccattccattccattcccatccattccaattgggtccgtttccttccattttattctagtccattccattctattcttgtaccttacattccattccattcgagcccattccattccactcaattcctttcgattccattcaattctattccattcgagtccatttccttccattcccttcgagtccgttctgttccattcctttctattccaggcaagtccattccactccatttcattccattccattccagtacattccaatacattccattccatttcattcgggtccattcatttccattcctttcaagtccattccattccattccattaggatccattcctttccattccattcgagtccattgcattgcattcgtgtccgttgcattcgagtccattccattctactccattcttttcgggtccattccattccagcccattccactcgagtccattccattcctttccatatttcactcgagttgattccattccattccattcgagtacattccattccattccattccattccttttgaatccattcaattcaattgcattccattcgagtccattcaatttcactccattccattgcattccgtttcattccattccattgcattccatttcatgccattccattccattcctttcgagtccatttcattccattccaatccattccattcaattcgagtccatatcattccagtacattcctttccattcgagtccattcaaatcggctacattccattccattcgagtccattcaattcattgttggtgggactgtaaactagttcaaccattgtggaagtcagtgtggcgattcctcagggatctagaactagaaataccatttgacccagccatcccattactgggtatatacccaaaggactataaatcatgctgctataaagacacatgcacacgtatgtttattgcggcattattcacaatagcaaagacttggaaccaacccaaatgtccaacagtgatagactggatcaagaaaatgtggcacatatacaccatggaatactatgcagccataaaaaatgatgagttcatgtcctttgtagggacgtggatgaaattggaaatcatcattctcagtaaactatcgcaagaacagaaaaccaaacaccgcatattctcactcataggtgggaattgaacaatgagatcacatggacacaggaaggggaatatcacactctggggactgttgtggggtggggggaggggggaggaatagcatcgggatatatacttaatgctagatgatgagttactgggtgcagtgcaccagcatggcacatgtatacatatgtaactaacctgcacaatgagcacatgtaccctaaaacttaaagtataataaaaaataaaacaaaataaaaaaaagaaaaaaaattccattccatttcattcgaatcctttagactccattccatttgactccattccatttcattccatgcgaatccattccattccattctattccattctattttattcgagtccattccattccattccattccattccattcgagaccattacaatccattctattccttttgaatccattctattccattccattcgcgtccattccattcgagtccattccattccattcgtgtccattaaattccattacattgcatttgaatccattccagtccattccattccactccattagactacataccattcctttccattccattccattcgagtcaattccattgcaatccattcggggccattccattgcattccattcgagtccattccattccattccattccattacattctattagactccattccattccagtcgagtcaattctattccattccattctagtctattccattgcattccattcgtgtccattccattccattcgagtccattccattacattctattcgagtgcattccattccattctattccattccattccagcccattccactagtgtccattccattctattacatattccattgcactcgagttgactccattccattccattccattcgagggcattccgttccatgcgaatccattgtattctattcaactctagtccctccattccattccattccattcgagtccattgcattccatccgttcctttccatttgagtccattccattccagtccattctattccagtccattccacccgagtccattccgttacattccgtattccattccactcgaattgattccattccattcattccattcgagggcactcccttcaattcgagtccattccattccattccagttgagtccattctattcgattccattccattccttgccattcaattcctttcgagtccattcaattcaattgcattccattcgagtccattcaaatacattacataaaattccaatccattccatttcattccattccattccatttgagtccatttcattccattacatttcattccattctagtccattccaatcggttcattccactccatttgagtccattcaattccatcctttttattcgaatccattccactccactcctttcgagtccattccattctactccattccattcgactccattccatttcattccattcgaggacattccattccattccattctattcgattcgattccattccattctatttgagtccattccatttcattcaagtccattccattcctttccattagagtccattccaatccattctattccttttgaatcctccattccattccattccattcgagtccgttccactcgtgtacattccattccctttgtgtccaatcaaatccattatatttcattcgagtccattccattccattccattcgagtccattccattccattccaattcattccattctgtccattccattcaattccattcgagtcaattccattaaattccattgtatcccattagattccattccattccattactttccattcgagtccattacattcaattctattcgagtacattgcatgccatttgagtccgttccattccattaaattccagtcgagtccattcaattccattccactcaggtccattccattccaatccattccattccattccattccattccattccattccattccatcccatcccactgcatttgattcctttccgttacgttcttttccattcatttcagttccattatattcgattccgttcgagtccattccattccattcaattccaatcgattccatttcattccattccattcgagtccattccattacgttccattagagtccattccattccattcgattccattccattcgaatccatcccattcgagcccattccactccattccattcgagttcgttccattccattccattccattctattccattatattccactccattacatttgagtccattccattccattcgagtgcattctattcaaatccattctagtccattaaattccaatcaattccattcgagtccattccattccattcgggtgcattccattccattccattcgagtccattccatcgcatttcattccattccttatgagtccattaaattacattgcattcaattcaagtccattccattctattccattagattccattccgttccactccactcgattcagggcaattccatgccattccattccattccattccattccattccattccattccattccattgcattcgagtccattccattccattccaatccattcgagaccaataaattccattccattccattccattccattccattccattccattccattccattcttttcgagtccattctaatccattcaagtcaattccatttcattccattccattccattccattccattccaaactgttctatgccatgccattccatttgactgcattccattccattccattcgagtccattccaattcattccattacat

SEQ ID NO: 2639 - DNA, 5246 bp, Homo sapiens
agtttccattccattctattgaatttgtgtcctttccctcccattgcattcgagtccattccattccatttctttccattccattccattccatttcattccattggagaccattccattccattcgagtccattccatacctttccatttcattcgaatccattgtattccattccattctgttcgagtccattcctttccattccattccattcctttcgactccattctattccattaccttccattccattagagttcattccactccaatccattccattcgagtccattccattcttttcattccattccattccatttgagtgcattccatttcactggagtccattccattccattctattccattcgatacctttcctttccattcgagtccattccattccattcagttcgagtccattactttctattacattacattgcattacatttgagtgtattcctttccattacattccattccatctgtgttcattccattccattccattcaagttcattccattccattcaatttcattccattccattccactttattcaacttccccccattccattccattccattcgtctccatttcattgcattccattccattcgaatccattccattccattcaattccatgcgagtctattcaattccgttgcatttcattccattcaattaggctccattcctttccatttcattccattcgcgtccattacattccattcctatggagtccattactttccattctattcaggtccattccattccattccaatccattccattgcattcgagtgcattccattccattccattgcatttgagtccattcaattccatttcattcatatccgttccattacattccattcttttcgagtccattccattccattcaatttcattcgagtctattccattacattccattggagtccaatccattcctttccattcctttcgattccattccattccattcgagtccattccattccaatccattccagtccatttgattgcattccattccattttttcgagtgcgttcaattccattccattccattcgaatactttcttttccattccattcaagaacttgccattgcatgccattccattcaagtccatcccattccattccattcaagtccatcccattcaattttatccattcgagtccattccattccactccattcctttggagtccattccattccattctactgcattccattccaatccattcgagtcaattccgtcgtattccattcctttccttttgagtccattcaattcccttccaatccatttgagtccactttattccattccagtccattcaagtccattccttttcattccattccattcaagtccattaaattccattccattccattccattcgagtccattaaattgcactccattccatttgagtcaattccattgcatttgactaaattccattcattccctttgagttcattccattccattccattcgagaccattctattccattccattcgagtccattgcattatactccatttgattcaagtccattcaattctattccattccagtcgaatgcattccactccattccattcgagtccattcccttccattgtattcaagtcattccattccattctattcaggtccattccattccattccattccatttaatcccattccattccactgcattccagaacattccattccattccattgcattccaataaattcctttccattcctttccattccattgcattcgagtccatgccattcctttccattcatgtccattccattccgttctgctcaagtccattccattccattcaattccaatcgagtccattccattcgagtccgttccattccattcaattcctttctagtccattccattccatttgagtccattccattccaatgcattccagtgcactgcattgcattccattccattctttcgagaccattcaaatccattccattcaattcaggtcctctccattccatttcattcaaggtctttccattgcatatcattccattcgagtacattatattatattccattcgagtccataccatcccattccattccattcaggtccgttccattcgagttcattcccttcgaatccattccattcacttcgattgcattccattccatttcattcgagtcctttccatcgtatctcattcctttcctttcgggtccattcaattccattccaaaccattcgagtcatttccattccattccaatacatttgagtccattccattccatacgaatccattaatttgcattccactccattcgtgtccattccattcaattcaattcgagtccattccattccattccattcaagtccattccattcaattccattcttttccattcaagtccattccatttcattccattccattcgagttcattccattgcatttgagtaatttccgttccatttgagtccattccattccgttcgagtccattcttttccattccattatgttctactcatttccatgccattccattccagtcgagtccatttcattcctttccattctattcaattccgttccataccgttcgagtccattccactccactcccctcgagtccattggattccattccattccacctgagtccattccattccacctgtgtgcagtccattccattccattcgagtccagtccattccattcgagtccattccatttaattccatttgattccattccattccattccattccattccattccattatatttctttcaagtaaattcaattcaattgcattccgtttgaggccattccattccattccgttgagtccattcctttccattccattaacttcgagttcattccattccattccattccattcaatttgaatccattcaatttcattccattccattccattcgtgtccattctattccattccattccactcgagttcattccattccaatcctttcgagtccaatccattccattccattccattccattcttttcaagtccatgccactccatttctttcgagtccattccattccactccattccatttgagtccattgcattctattccattcgagtccatacatttccattccatttaggtccattcccttccattctattccattccagtccattccattcaattgcattgcattcctgtccaatctattccatttgggtccattccattccattccattcgagtccattgcattccattatattccatttgattcctttccattcaagtgcattcctttccaaaccattcaattcgaatccattccattccattccattcaagtccattcctttcaattccgttccattcgagtccatatctttccattccatactatttgagtccattccattccattccattccatacgggtccatacccttcaattccattcgagtgaattcgattccatttcatttgattctattccattgaattcaattccatcacattcgagaccattcaattccgttacattcctttcgagcccattccattccattccattcgagtttattccattgcatttcattcccttcgagtatattcctttacattccattcgagtcaattccattccattcaactggtctccattccattagaatccatttcattaaattccattccattcattcgagtccattcccctccatttcagtccactcaattccattccatttcagtccattccattcctttgtattccattcgaatccattcctttccattccagtccattccattccattccagtccattgcattccattccattccagtcttttccattccattcgggtccattgcattcctttcaatttgagtccatttaattgcattccattccattcgattcgagcccaatccattccattccattcctttcaggttcattcctttccattccattccattcgagttcattccgttccgttacattccattcctttcgagtccattccattccattccattccattcaagtgcagtccaatccattctgttcgactccattccattccattcaagtccattcctctccattgcattcgagtcaattgcattacatgctattctattccagtccattccattccattcctttccattccattccattagagtccattccattccattccattcaactccattgcgttgcattccaatccaatttggtccattcctttccattccattacattcgagtccattattttccataacattccattccatttgggtgcattccatggcattcaattcaagtccagtatattccactccattccattcaagtccattccattccattccattccattccactccattccattcgaatccattccattccattccattcgaacacatttcgttcattttcattccattccattcgagttcattccactctgttacaacaaattccatcctagtccattcaatacaattccatcccatatgggtccattccactccattccgttcgagctaattccattctatttgagtccattccattccattgtattcgaatccattccgttccatgctattacatttgagtccattccattccattccattcgagtccattccattcaaacccattccaatccagtccattctgttccatttcattcttttccattccattccattccattccattccattccattccattccattccattccatttgaggcaaatccattccattggattcaattcgagtccattccattccatttcattccattcgggtccattcccttcaagtccttttgagtcatttccattccattcctttgagtccattccattgcattccattccattcgaatccattccattccattccattggattccattccattgtattccatccgactcctttggagtccatccaattacattccattccattcgagtccattctattgtattccattggtgtccattccattccattccattccattccattccattccattccattccattcgagtgttttccattctattccattcaagtccattccattccacaccattagtgtcctttccattaaaattccattgtat

SEQ ID NO: 2640 - DNA, 300 bp, Homo sapiens
  misc_feature (1)..(300): DMR21:12398001
ctctttctgtagtatctggatgtggacatttggagcgctttgaggcctacgaagaaaaagtaaatatcttcccataaaaacgagacagaaggattctcagaaacaagtttgtgatgtgtgtactcagctaacagagtggaacctctcttctgatgcagcagtttggaaacactctttttgtagaaactgtaagtggatatttggatagctctaatgatttcgttggaaatgggaatatcatcaactaaaatctagacagaagcactctcagaaactactttgtgatatctgcattcaggt

SEQ ID NO: 2641 - DNA, 200 bp, Homo sapiens
  misc_feature (1)..(200): DMR21:13434701
tggcaggtggaggttgcagtgagccgagattgtgccactgtactccagcctgggtgacaaagtgagactctgtctcaaacaaaaaaaaattgatcagataaaaaaattatgaaacgatggcacaaataagatgttaaaatttgttccaaggagaattccaaaacccacacatatctgagaccatcaagtatgatgaaata

SEQ ID NO: 2642 - DNA, 3200 bp, Homo sapiens
  misc_feature (1)..(3200): DMR21:14534901
ctgctctgctagactgaccctaatacactaccctggggtaactgatggaggctttcttgaggaagtgacagtccacctataaattcgaatagataagaattcatgagttggaaaaaaagcacagagcattttaggctaagagaagcacagacagaaatgtatgagagtggtcagatcatcaggaacacgggcctcactccaccaaccaaaccagaagatctggtattagggcccagacataggtatttttataaaacaccccagatgattttaatattaggttggtgcaaaagtaatcatgatttttgctattatttttaatatgcagccagaaagcatgggtcaagggggtcaaatagatgttttactttttagttttcaaatgattcctaatagaggtctagtgggttgtggcagagttacatttggatgtgaggaaggaaagaataacaaagactggagagtgtaggtaaaggcagtcaagtcaaatgtggggctggcagcatgaagggattggtcaactggaagtggagaaagatctagagtaattggaaggaaggaaacaactaaaaacctaatcctcacttccaattagtacaagctcatggactatgttatgagctgaattgactcccacaaattcgtatgtttgaagccctaacaccttgtacctcagaccatgactgtatttggatataaagcctttaaagagaaaatcaagtaaaaaatgtgaccattagggtaggacctaatccgttcctactggtgtccttataagatgatgtttggacacacagagagagacatcaggagcacacagacacagatgaagaggcaataaaagggcagccatctacatgtcaaaaagaaaggcccagaacagatccttccttgaaagctctctgtgaaacccaccctgccagcaccttgatcttgggtttccaacctccagaagtgtgagaaagtggattcctgttgttaaagctactcagactctgatattttgttatggcagctctagcaaactaatacagactaagtgaaggaaggagggggacttagccagctgtggtgacaaatggctctctctatctatgcaagaatcacttcatctaccaacagagatagtttaaaatcttctgctattagtaatcaattcttaatggaggacatttttgttttctactaagaagctaatatgaatgtcttgtttctgaaagttcatcgaaatctttaacactagaaaggaggagaaatggatcagtttggtaatgataaatttggaaacggatatgtaaagcatggacttgattccattattgtaaaaacaaacaaacaaaaaaaaacacagttttcagggattttgaaactatttatctccaaagcaaggcaaagaaagactaaagagataagtgtgtgactaaattgatttttaacaaatccagcatcttggtagtcaaggtagtgaccttataaagcttcctataaaatacaatatccaaatttccaaacaaaggggaggctacacttctgtcatttctctagctattcatctgatctttctgaatattatctgaacacttttcaagtatagctaatacatttggccccaaacattttgctacctgcttgggataaaacttgattacagattcatattctgtaaaacggaaaagctaaaatgtattagtgctttgtttggagagaagtggtcaaggctaaaaattatttaaaaggtgcactacgaattaaaataaaatccaatggaaaattatatgtttaagaaagaagaagaagaagcctttgcaaagtgagacatcaatttaggggtgaatttctggtgactgtaaacaatggaatgaggccatttctccttggcatgcaagcaccaactggaagcaagaatgggaccggacagtggaaactttctgtctgccatctttagacagcatgtagtaagttacctataaacatccaaatggataaagtaagtacaaatatatcccaaatttagagtcttctcaacaccaaagtcaactgggccgttcctttgtctgaaccacagttatcccttgcctggtttctgcaatagtctgttaactggtctcactcccttcagtatatttgaaacacaaaagccaaaataaacccactaaactgtaggccagattctgtcacttctcaaacatctttcaacactagctaaaattattttaatggcctagaacgccttcagtgatccagctctttgcggcggctcttcccgctatgcactctgccccactgcttctcaaacacaccagagacagtcccatttcaaggcctttgcacttgctcttccctctgcccagagtacagtttccttcaccaatcccaagaccagctccttcactttcttccagtcctttttccaatgtcccattctcaccaaggcttctctagttcttcatatttcaaatccttcttttctgttaatttttttttcttcttggcacctatcattatctagcatactgtatatattacttatttatcctatttattgtctgtcatctccagcaaatatggtatcttttgttcaccttggtatcgccagtgtattgtccataataagcatttaatagacatttgttgcgttgaaggataaatgaatgaacgaatgcatggattagtgaattaacttttaagtcttttgaaaagtagaaaaaagtgctgccaggttggaaaactttaaaaattcttgatgtccagtcacattttatattaggtaaataagaatatttggggatggaacccaatcatcagttttttttttaaagctctttagtgattcaaatattcggcctaggctccaaaaaccatcaacctagagcatcatttccaaattataaagtgctcacagaactgctgagtatcttgttaaaatgtatgttttcatttcgtaggcctgggggagactggaaaatgcacatggctaacaagctcctggaatgcccgtgctgttgctctataggaccacagtgagtagcaagttcttagattcaagtcagccttgatgaaccttgagatacattttaacatgttctagacttcattttctcctgacttgtcttatttggttttatgtttgcattatagtttatcaaaaatactttttaaaatgctataaatgctacataaacacaaaaatgaagacaacc

SEQ ID NO: 2643 - DNA, 200 bp, Homo sapiens
  misc_feature (1)..(200): DMR21:15722601
aagagggaggtgccaggctctttttaacaaccagttcttatgggaactaagagtgagaactcactcccaagagaatgacaccaagccatttataagggatctgccctcacgatccaaaaacctcccgccaggccctaccttcaacattggggatcaaatttcaacaagagacttggtgagggccaaagaaaccgtatcca

SEQ ID NO: 2644 - DNA, 200 bp, Homo sapiens
  misc_feature (1)..(200): DMR21:16665201
catcatctgttgtttcctgactttttaatgatcgccattctaactggtgtgagatggtatctcattgtggttttgatttgcatttctctgatgaccagtgatgatgagcattttttcatgtgtctgttggctgcataaatgtcttcttttgagaagtgtctgctcatatcctttgcccactttttgatggggttgtttgt

SEQ ID NO: 2645 - DNA, 300 bp, Homo sapiens
  misc_feature (1)..(300): DMR21:16876301
taatccatgcatttccagccacctcatcttcaacaaagacaccaaaaacatgcaatgaggaaaggacagtctctttaatgaatggtgttgggaaaactggataaccatacgtagaaaaacaaaggtagacctctatctctcactatatacaaaaatcaactcaaaaattaactaaagatttaactctaggccttgaaactttgaaattactagaagaaaacattgcggaaacactccaagacattggtctaggcaaaattttttgtgtaagcataggcaaccaaagcaaaaaaagacaaa

SEQ ID NO: 2646 - DNA, 1000 bp, Homo sapiens
  misc_feature (1)..(1000): DMR21:17383301
aaaaaacaaacaaccccatcgaaaagtgggcaaaggatatgaacagacacttctcaaaagaagacatttatgcagccaacagacacatgaaaaaatgctcatcaccactggtcatcagagaaatgcaaatgaaaaccacaatgagataccatctcatgccagttagaatggcgatcattaaaaagtcaggaaacaacagatgctggagaggatgtcgagaagtaggaaagtttttacactgttggtgggagtgtaaattagttcaaccactgtggaagacagtatggtgactcctcagggatctagaactagaaacaccatttgaccagccatcccattactgggtgtatacccaaaggattataaatcatgctgctataaagacacatgcacacatatgtttattgtggcactattcacaatagcgaagacttgaaaccaacccaaatgcccatcaatgatagactggattaagaaaatgtggcacatatacaccatggaatactatgcagccataaaaaaggatgagttcacgtccttttcagggacatggatgaagccggaaaccatcattctgagcaaactatcacaaggacagaaaaccaaacaccacatgttctcactcatagatgggacttgaacaatgagaatgcttggacacagggtggtgaatattacccactggggcctgtcgtgggtgggggactgggggagggatagcattatgagaaatagctaatgtaaatgatgagttaatgggtgtagcaaaccagcatggcacatgtatacctatgtaacaaacctgcatgttgtgcacatgtaccctagaacttaaagtataatttaaaaaaaaagaaagaaagaaaccatcttgaaaatctccaatttgttttcaatgttttctcagaaattacgttgcttttttttttttgaggtggagtcttgctctcgtagccccggctggagcacagtggcactatctcggctcactgcaacctct

SEQ ID NO: 2647 - DNA, 100 bp, Homo sapiens
  misc_feature (1)..(100): DMR21:19678301
atttagtgcttctttcaggagctcttgcaaggcagacctggtggtgacgaattccctcagcatttgcttggctgaaaaggattttatttccccttcactt

SEQ ID NO: 2648 - DNA, 2400 bp, Homo sapiens
  misc_feature (1)..(2400): DMR21:22283201
gcccaccagcacacctggctactttttgtatttttagtagagacggggtttcaccatgttggtcaggctggtctcgaactcctgaactcaggtgatccaactgcctcagcttcccaaggtgcgggggttacaggcatgagccactgcacccagcctttttttcttttttatctactctattttccaaacatatgatttggaaatttgagataaataactggtgcagctgtttttctctgggatccagcctgaccacagagaatatgtgatttttatttgctatgctggtctctaagccttgttgacttataccagtactacctctgacagcttggctaagtttccttacttgtaaattcaaggggtcagttagtttttacgctaacatatgtcctcctacctagttctatcataacagaggtaatgttttctccttaatattgactccttatttcaaatctcagcctcttcaggttttgaggagaaaacagagatgatttgtattggaaaggccccagggaactctcaacgcatgcatgacactcaatgttgtacttcattgtcatgattatttggccttctcgatagagttataacatgtttactactctccttggaggtataaaaaatgttttgaaatatgattgaagtggagttagtcatagagatatgaaaaccagtactcttccccttacaggaagaaaggctactacaatgtcaatcctcaaaagactactgttgtctcaaaatgtggttgtctcgtaaccttcatcaacataaaagagaaaagaacagaaatactgtgaacaaatttctaaaatatttaaggaaatttttgataaactttcaggaataccttaaaaagctatgggatcaggtaatgtttactagtaaagcaaatgaaggtgtatgtattcataatttgccttacagaataatttttctatccaataagaatgattatcatcaagcccaatattttcttgttcatcatggggaaaataaacgttaagttataatcatttaccatacttaatatttaatattgggtatatttctacattgtgtcatgtattgaggtttacatgatatacaatacaatgatatacaatgcaatgcacttttaagtgtacaggccaatgtattttttttttagacagagtcttgctccttcaccaggctggagtgtagtggcacaatatcaacccactgcaacctccgtctcctgggttcaagctattctcctgcctcagcctcctgagtagctgggattacaggtgtgcaccaccatgcccagctaatttttgtatttttagtagagacggggtttcaccatgttggtcaggctggtcttgaacttctgacctcgtgatctgtctgcctcagcctcccaaagtgctgggattacaggcatgagccactacgcccggtaggccaattattttatcaaatgcatatacccatgtagccatgaacacaatcaggatatagaacttttctattataccaaatgtatcctcattcctatttccagtaaatattttcacactctggcattcaggcaacaagtgagctttttttctgacactatagattagtcttgcttttttatgatttaatatatatcaaaccgtatgaagttttttcttatttcttttactcagcaaaatgtttttgatgctcattcatattgtggtgtgtatctgtagtttgtatcatatgattgctgagaagtgtttccttatatatagatttgtcacagttttcttattttcctgctgatggacattatgtttttccagtttttgattattttaataaactgtttgtaaactttcatgtacaaatatttttgtggacatacatttcatttctctttaatcaaaattgagaagtagaaatgcaaggtcatatattaaggatggatttaactttctagaaactggcaaatagtttattaaagtggttgcaccatttttacaaccccactagcagcgtgtgagagttcccatggcattacagatacttaatactcgcaatgattattactattgtcattttaatgtgtgattagtggcatcttatttacctctcacttatttgactaacatttagaaaaatgttcttatatatttacacaaatcattttaagatgaatgtttatttgttaccaatgagttgatggtatttgacgatttacacaaatatattgctgtgcgtgaattaatgtttctttttgattatggtaattttcaaaattaatccctatcttctcatatttcttgatgttcaacaatctttactactactgttaaatgagttaccagttgtttaacatactatatctcagatattcttccacgggaacacatattaactcacttgattttcagaacaact

SEQ ID NO: 2649 - DNA, 900 bp, Homo sapiens
  misc_feature (1)..(900): DMR21:22396001
aatgtatatataatttcactaatcccttgaaagaaactacaaaatttaaaatagaactaaaatgatcaactgtaaatagatgaaagcaagtagaaacaaacaggacaaaggtggcagcataggaacgtttgtaaacagtatagtcttaatcaggaggacacggattaggtattagtggactatgtggtaatgaacactcccacgtgcccacatacacacgcgtacacacacttgcagaactgaggcaggaaaatagggtctggaggcagggaacataaggctgatttacacttcagctatgacaggaaatatcctctccatagggcagacaccgagtaaatgactgtaactttactttgtcctctccatttacagcgggcatactcgaagcaaccaatgaaatcctttagggggtattttaaactcctaaaaattccttaatagggcctttgagctcctatgcttgggccctctcccacactgtggagtgtactttcactttcaataaattcctttgtcccttccttgctttgtgcgttttgtccaattctttgttcaagacaccaagaacctcgacacgaaccacctttaacatagtttggtgaaccagcctggaggcagaggtaagcccaaagtttgggatttattcttctcctttcttctttttctttctgctccatacaagggaatctttctcccttttcctttccaacccaggacccttagtagtcagatcctaaacatggaagcaaatgcaggtttctggctgtggccagtaaacctaagggggttccatgtggagaagcctgaccaccaccgcccagttcgcttaagaaacctgggttttttttccacgtcttttttctttttcttttttttcctctttctttttcagtcttt

SEQ ID NO: 2650 - DNA, 200 bp, Homo sapiens
  misc_feature (1)..(200): DMR21:23553901
ctatgatgggtaagttatttttcgtgttataatttataatacttttcaaatatcacctggcttaattcatgccacaggcccttttccatcactcagatgaatttttaaatcttatattcattatgtattttgctattttgtttaccacattgattttcatgcacttgcttagtacactttcattcaccatcacataagtt

SEQ ID NO: 2651 - DNA, 1500 bp, Homo sapiens
  misc_feature (1)..(1500): DMR21:23591301
gtgtagcaccttcagcttcactctcttcctcctctgcccatgtaagatgtgccttcttcccttttgccttctgccatgattttaagtttcctgaaacttcctcagacatgcttcctgtacagactgcagaactgagtcaattaaaactcttttctttataaattacccatctcaggtaggccattgctaggtctttagagcaatgtgagaatggactaatacagaatcatacacgataagctgtgttaagaggtttttattcatagaagcatatatcttgacctaagtttaacatttctaatgatgaaaagacataagggcattacggtggaaatgtcctctttataccgtcttattgcacttgccataacagatatcagcatccttaacacaggagggaggaagctttccctccatgcttcagagtatgtttttaacttaaataaaaggtaatttcaatgaaataagtttactgtgtaactttagaattggatctaaggtgcacatgtgttattgtatttcagtgttatttattgcaaggaaattaatagttgcgttttaggtggtaattatttttcattcttgggtttttatttctacttgtatattcagtagcatccctaagcaaaatattataacaccaacaaaatatttttcattaacaattttttgttagaataataatgaggcaagaacaaagaagctatgtataaattaaaaagaataataatatgtcaagcataatttttttaaaaggattcagtaaaccaagttttaaaagactgtagagaaaaatgtgggtagtgggacatattatccaatatatccagatgtgtaattcatataaggaaaaaagctgagatacctctgaaggataatgatatccagtttgccatatataagttcataagctgtgtactttacaacttaaccccagttttatagtttaacattttctttttctaccctattccgtggggactggattctctaactattcattaattatcaactctactaacaagcaaagcttttcaaagtttagcttggttcttataatagtctgttcttgtcttgctataaagaaatacctagactgggtaattcataaagaaaataggtttgattgactcatgattctgcaggctgtacaggaagcatagtgacttctgtgacggcctcaggaaacttgctcatggcagaaggcaaactgggagcaagtatcttacatggctggagcaggagaaagagagaaaggagaggggcaaacacttttaaacaatcaggtctcgtgagaactttatcataagaatagcaccaaagggagaaatccacccacgcgatcgaatcacctcccaccagtccccacctccaacattggcgggttcaattcaacatgagatttaggcagggaaacaaatccaaaccaaatcagttccattcaaaaacataaaacaaggtaatttttgtcttgatggtttgattatatgaactaaaatt

SEQ ID NO: 2652 - DNA, 200 bp, Homo sapiens
  misc_feature (1)..(200): DMR21:25579601
aaagtgaatacaaattaaaatttatctactaaaagacagtaattcaaagactagatttaaaaggaaaataagttttatgctatttacaaaagacagacttaaaacctaacaacataaaaatgctgaaagtaatataccaggtaaacactaaaaaaaaaaaaaaaaaaaaaaaaaactagtattaacaatagaacctgatt

SEQ ID NO: 2653 - DNA, 500 bp, Homo sapiens
  misc_feature (1)..(500): DMR21:26220001
tgtagcaaatctcagtaaacagcccttatctaccatgtacttcctagtcaccttctcccaatttaccacccctaggaacccaagctccccatttcttttgtctagtcatgtctccccgagttatcatcctttgctaaaatggtgtattagtcccttttcatgctgctgataaagacatacgctagactgggtaatttataaagaaaaagaaatttcatggactcacagttccatgtggctgaggaggcctcacaatcatggcagaaggtgaaagatatgtcttatatagtggcaggcaaaaagagagagtgagaaccaaacgaaagggtttccccttataaaaccatcagatctcatgagacttatttagtaccatgagaacaatatgggttaaacccatgattcagttatctcccactgggtccctcccacaacatgtgggaattatgggagctacaattcaagatgagacttgggtggggacagagccaaaccatatc

SEQ ID NO: 2654 - DNA, 700 bp, Homo sapiens
  misc_feature (1)..(700): DMR21:26397901
ctaaactttcaatttcctggcaagtatcttccattggccaaactgaaagctggagggcaaggaagcttgttggtgcagtccctagaagttgaagtcttggatttcaaaggaggatagcgaaggttggaaagcgaatctggcgtggggggtggggcaaaccccaaatatccaggtgccttctctatttattagctgaggtggttaattggtggtcttccaagtattgacagtttccttccaatctttatttgtgcaggataatatctctttcagaggtagggaaaacatgatggaaagcataaatttcaaccatgaaattccatgccccctccctcacagaaggtattgtgacagaaaagaaatgtagaacttcaattcactttataagtaccgcgtgctaaccaattgtgccactggagccacagcactcaatttattttagattcctagttagcataatttgtagaaaatcaaagctagacagtagtgatgtctctcaaatttgtttgacaagaggtctaaaaattgtccatatgtgtattaggctgctcttgcattgctagaacagcacgtatgaatatcccacacatggatatcccaagttttaacttcagaggctgaatatgtctgatcgcattgcagaacacaataaatcatcttgtctcagagaaaatcctataattaggtaattggcattgat

SEQ ID NO: 2655 - DNA, 1900 bp, Homo sapiens
  misc_feature (1)..(1900): DMR21:26854801
tcgctcgccttccaccactgctgtttgccgccatcgcagacctgccgtgctgacttccatccctctagatctggcagggtgtccgctgtgctcttgatccagcgaggcgcccattgccgctcccgattgggctaaaggcttgcaattgttcctgcacgctaagtgcctgggttcatcctcatcaagctgggttccacggttctcttcatgacccgcagcttctaacagagctataaaactctgtgcatggcccaagattccattccttggaatctgtgaggccaagaaccccaggtcagagaacaggaggcttgccaccatcttggaagtggctcgccaccatcttaggagctctgtgagcggagacccccaccccccggtaacattttggcgaccacgaagggacctccaaagcggtgagtaatattggatcactttcgcttgctattctgtcctatccttctttagaattggaggaaaatactgggcacctgtcggccagttaaaaacaattagcgtggctgcccgacttaagactcaggtgtgaggctatctggggaagggctttctaacaacccccaacccttctgggttggggacgttggtctgccccttccactttcaattttcttggggaagccaagggtcgactagaggcagaaagctgtcgtccggaactcctggcagtagccggttgagatcatggcgcagccagaagtctctactcaacagtcgcccatgcgtgcgctcctacctttcctcctgacccatacctcctgggtcccgacgatgactttcttgaaagtgtagccccaaaattctgcttacctctgaatctacttcccctgatccctggctcctaggtactaatggttcagtttcatttcctctagcaagttgtatctccaaagggatctaaggaagctctacgctgcgtccttaggcatctaggctataaacccaggaagtcttgtccctggtgtccctcccgatttaggcatacagctctcgacatgggcagttatgtgggacccgttccccatcacccttgtcaaggccccaagtttgtaatggctaagaggagagagagagaaagagagagagacggaggggagagagagagagagagatggaggggagagagagagagagagacggaggggagagagagagagagagagagacggaggggagagagagagagacggaggggagagagagagagatggaggagagaaagacaaagggagtcaaagagaaaaagaaagagaaagacagaaatggtaaaacaaacaaaaaacagcgtgccctattcctttaaaagccggggtaaatttaaaacctataattgataattgaaggtcttctccatgaccctataatactccaatactaccttgttgtcagtgtaaacaagggcgtagcctgaaaacactgagaccactgacaacctgcagctttcctatcaaaaaatccttaacccagtaaccggcagatgcattcaatctgtagcagcaactgttttgctaacagaagaaagtagaaaagtaacttttagaggaaacctcattgtgagcacaccttaccagttcagaattattctaagtcaaaaaagcaaaaaggtagcttactaactcaaaaatcttaaagtatggggctattgtgtttaaaaaaaaaaaaaggtaatttaacaccaaccactgataattctcttaacccagcaggtttcctaacaggggatttaaatcttaattaccatacaaaggtctgaccacacctaggaggaactcccttcaggacaggactatagagggttcctcccaggtgattgaggaaaaaaccacagtgggtattcagtaattgatagggagactcttgtggaagcagagttagaaaaatt

SEQ ID NO: 2656 - DNA, 1200 bp, Homo sapiens
  misc_feature (1)..(1200): DMR21:27779801
tttggcagcaggcttttcactggaaacttatggcatgatatatttaaagtgctaaagggaaaaacttttatctttgaaaagtacaaccagtgaaaatatcctttaaacattaagaagaaataaagatcttctcagacaatcagcagctgagggatttcatcaccaccagacactgcccataagaactgctaaagggagtacttcaatctgaaagaaatgagcattcatgaacaataagaaataatctgaagataatatacaaaaaatactccacggaatattatagcactataattgtggtgtgtaaaataactttatcttttgttttgtttgttttgtttttgagacagattctcactcactctgttgcccaggctggagtgcagtgacgcacctcgctcgctgtaacctctgcctcccagcttcaaagtattatcctgcctaagcctccctagtagctgggattacaggcctgtgccaccatgcccagctaatttttgtatttttattagagacagggtttaatcatgttggcctggcaggtctcgaacccctgacctcaagtgatccacccacctcagcctcccaaagtgctaggattacaggcatgagctgccatgcctggcctgtaaaatgaccttatcttaagtagaagactaataataaaccaattaaaaataatagctgcacaactttttgagatatacacagtacagtaagacatatagagaaacaacaaaaagttaaaacgcaagcatacaaagttaaagtgtagggtttatattaattttccttcggtttatttcttttatgccatcagtgttaagttgtcaatttaaaataatgggttataagatagtattcacaaggctcatggtaacctcaaattgaaaacatataacagacacaccaaaaataaaaagcaagaaattaaaggataccatcagagaaaatcaccttcactaaaaggaagatgggaaggaagaaaagaagaaagagaaggtcacagagcaaccagaaaataaataacaaaatggcagaagtaaatccttacttatcaagaataacattgaatgtaaatgaactaaaatctcaaatcaaaagacatagagtagctaaatgggtaagaaaaaaaaaaaagcaatgcccaatgatctgttgcatacaagaaacacacttcacttatacagatacacatag

SEQ ID NO: 2657 - DNA, 1400 bp, Homo sapiens
  misc_feature (1)..(1400): DMR21:28634201
catcacttttccttttctcacggggatccagctgatttggaaggagactgggaagtgtgcaaggggggaatcctatggaactgagcttgggaagcaggtatttgctggcagggatgctctcctcctttgctgagaggctgtggtccacagcccttgccaaatctgtcgcagtagctaacagtacatttccatgtatgtactattttctcccaattttccccaaggaaagggcgagtcaggatatgcacgcatagcacaggacaaaaatagccttgtttaagtagataagtagctattaagtgaagttccttgactttgtctattctgagcaccagtatttgcactagtcaggcagcatccccctaggtcaactacctgtgtattcttgtactctctactgaaagacagtatgcacagggcttatgaaaacagacattagaaataggatttgagtccttggggtagttgtgtgacttactggttatatgaacttagacaatttaccgaacctctctgagcttaaatttgctcatttataaaatggggtaatacaagtttgtaacttatagacgtattataaggataaaattaattaatatactgcatataaagtttctagctcagtgactgacacatattacgtgctatgtgatgcatatgttaagtgcttgtgaaggttagctgttactattacaccaggtattcttgaacatttctttaactcagagttaaagccaggaaagacatgtgttacatttagtttaaaggataaaaaacaatatagcatagacttgggagtctggtagtttatcacgcaggtaaatgctatagcagttaaaagtcagcaaagttcaaaattaactctgaatgatctatgatctatgtgtttaatgtcctcatctttttttttttttttctttagatggagtttcgctctttctcccaggctggcatgcagtagtgccatctcggctcactgcaacctccaccttccggtttcaagtgattctcctgcctgagcctcccaagctagctggcattacgggtgcctgccaccacacccagctaatttttgtattttttagtaaagacagggtttcaccatgttggccaggctggtctccacctcctgacctcgtgatctgcccacctcggactcccaaagtgctgggattacaggtatcctcatctattaagtaataatcaagtcttcctcatgagattttaatggcacttaaatcaaaggaagtaaaacatcaagcccacaaggattaagtgtacaattaatgttagtcatcattaccactaaaaattaacatgagcttaaatatatacaaactatagaatataggcagcaggctccattcatttaaaaactactgatactacactactgtgta

SEQ ID NO: 2658 - DNA, 1700 bp, Homo sapiens
  misc_feature (1)..(1700): DMR21:31031501
ggtttcccaactggtcaatggccattcctggctccccaaagagaaacagttaccagaacacctggctgagcgtgaagagtcattcaaatggcgaattggaagtacagctgagattggattccatggaattttctcatgataaccctaggaatatatgggggaaatgggtagaagataagagatccagctattctgattcatgaattgcccaatgagaggggattagtggtttctttttaatctgagaggatgtattagatttctattggtgcaaaacacaatacccaaaatttagcaacttaaaacaccacattttattatctcacagttctgtaggtcagaaattcagtaagcctggctgggttctctgcttagaatttcataaaaccaaagtcaaggcatcagccagtctgggcctttatctggaggttctgcagaaggatctaattctaaactcgttcagtttgttgacagaattcagctctttgtggatgtaggtctgtggttcccatttacttgctggctgttaggtgggagcatctctctgcttctaagcagcgcctgcatcccttcatatggggtccactccatggtcaaagttagcaacagtatgttgaatctcctccatgctttgaatctctgacttctgctatcagtagagaaaacattctgcttttaagaactcatgtgatgagccgggcgcggtggctcatgcctgtaatcccagcactttgggaggccaaggcgggtggatcacgaggtcaggagatcaagaccacggtgaaaccccgtctctactaaaaatacaaaaaaattagctgggtgcggtggcaggtgcctgtagtcccagctactcaggaggctgaggcaggagaatggcgtgaacctgggaggtggagcttgcagtgagccgagatcacaccactgcactctagcctgggcaacagagcaagactccgtctcaaaaaaaaaaaaagaactcgtgtaattagatcagacctaaccagatcattgcaaggtcatgtgccatgtaacataacacaatcatgagagtgtcatctcatcctattcccagttcccatgaatcagggcagggcatttttgtggaggccactgtagaaattctgcctgtcacaaagaaagtagcggataagtcagtaacataggttttggtgaagactgatttgctttcaaattccagctctgtaatttgagtgggtttctgtttaaagtcaggttaaattgctgaacttctcaagcttcgctttctgtagattacaatctacttaggagcagggtaccaactgctacttcccatatactttgcacagtgcccaagacatgccagtgtttgcaaatatttgaaaggatgaatgaatgaataacattgaaagtcatccccaaaacatactataaagctgtatttggccctgttttgtcaatgtttctttcattgacttgggccaatgagattgtgttaatgaatttacccaaactgacttgggtcaatgaacaaaaacggagaagcaatgtacattaaagagataagtgaaataaagctgggccaaacattgggtaacacagccgaaattaagaagagtcatggcaaactaaaaaaaaaacaagcatttcaatcaactaaaatgaagattaattagtttccttaatgacttcggcagctaggaacctcagagctaggt

SEQ ID NO: 2659 - DNA, 900 bp, Homo sapiens
  misc_feature (1)..(900): DMR21:31118901
attgtctggaaatataaagtcataactgatttttataaaatataactcctaaagctactataaaattcaggtctttaaagtacctactgatgtgtcaaacaccaaatagatattttccccaaaaagaaagttttcatagtattttaaacccttcttaggaagtggacattgtgacatgggaaaagaaaaagctataaacctttttttaaaaaaaaaaaaaaaattgaaagtgctataacttgtttttcttcttagtatttggatatctgtttagactgttaatgttttgagcatgtttaccctgtttcgttggcatgaagaaagtgttaaacacaagagaagtttttaaagaggttgttctgtttaaaggtttggttatggactgtcagggaaggggaaggtaatctatggatgaagatgcaattttgatggaaaaaccaatgatcaccatggcaaccccatgagaaggaggctcccctccctgccatgtgcaacagacacacacaccgcccaccggggtgtcatgtttaatccaaccaaactcccatctcaaatatagattcaaacattaaaaaaaaaaaatccgctttttggaagaaaagtatatccttcgcatgagcttgctggcctttcatatataaatataaaaccaccacgcctcactctctctgtaaaaggttatatcctcattttttaggctcagggatacatacactaacactgtaaaattctcatctatttgtgcccctgtatctcaggtaaaatacaaaaaatagtgtttcttttctttctctcaagcgataaatttggatctcttttcaaagagtttggcatctctataattctatgcaaaactagagcttccgaacatggacacagagtaagaccagccatagacca

SEQ ID NO: 2660 - DNA, 2200 bp, Homo sapiens
  misc_feature (1)..(2200): DMR21:32147001
gatatatacactagatttccatcttttccctcttggtgcctgaatcttagtaaaagtgttctggtttgggggatgtttcttgaattacatggttcattagctcgttcatgcattcagcactatggcaggtccattgtcgctgagaataagcaagatgtggaggacacaaaaataagacccagtcactgcctttgagaagctttgatagcaagatccacacttaaacctattactgccacataatcaaagagctatgccaggaatgacagttcctgggcttggaagcattcaagctgagtttgcagtttgagttcaatcaagttaattaatgctgcaccaaagaaagcaaaaacaaataaactcctgtgaaagaatataacagaatccagaattctacaacataaactttgtaatatgcagggtacaataaaaaaaactattcaacatatgaaaagccaaggaaatgttacccattcttgagagaaaagacaatcaatggagatcaaaaccagatggtgaaatttgcagacttgggttttaaagcacctttgagccacattcattgacttaaaggaaaatatgcttgcaatgaatgaaaaaataggaaatctcagtggagaaatataatctataaaaagacccaaatagaaattctagaactgggccgggcgaggtggctcacacatataatcccagcactttgggaggccaaggcaggtggattgcctgagctcaggagttcgcaccagcctgggcagcatggtggaacccggtctctactaaaaaattcaaaaacaaattagccaggcatggtggtgtgcacctgtagtcgcagctactcaggaggctgaggcaggagaattgcttgaactcaggaggcagaggttgcagtgagccgagatcatgccactgcactccagcctgggtgacagagcaagactctgtctcaaaaaaaaaaaaaaaaaaaaaaagaaaagaaattctagaactgaaaaacacatctgaaatttaaaatgtactggatgtgcttgagagcagaatgagaatgatacaggaaagagtcagtaaactttaagatagatccatggaaattatttaatcttgaaaaaaaaagggagagaaaaaaaaggtttaaaaactaaatagtctcaggaaccagttaaaaaaagtttaacatatatgcatttggaacctcaaaaggagataagaaagactatttatctttcttaattatttttctactgcccttatttggaggtaatggttcaaaaaaacaattgtaataaataatggatgaaatttccccaaattttgtgaaagacataaatttacagattgaagaaactcagcaaaccccaagcaagttaaatatgagtaaatatgaagaaaaccatgcctaggggacatcatagctaaatgctgaaaataaaaataaaggggaaaaatcttaaaaacaagcaaagaaaaataatataatacatagaggagacaaagatttgaatgatttttgacttctcattaaaaactctggaggccagaagacagtggaagaacatctttaaagtgctgaaagaaaattcacttggcaaacattcagtgaaaatattcttcaaaaacgaaggtgaaataaagatatttttagataaaaagaaaagagaatgtgctaacagaatgacactaccagaaataaaagaaaaattttaagttgaggagaaataagaaaagctggaaaatcaagtccttaagaaggaataaagactgtcagcaatgacaaatgtctgtctaaatatcaaccctataactgggaactatatccctccttccctatatgagttctgtttaaagttgaacacaaaaggaattccatgatatctctgacatggaaaggaagcagtaaccattactccctgaaggcttagagtcagatgcagcgactgaagaagaaacaacttgggcttggtttacagatggttctacacaatatactggtaccgcaaaggagagctgcaacacgacattgccactgaaggacaggggtaaacagaaattctctccgttggcaggaattcaagcaatgtacttgttgttcattttgtctggaagaagaagcggctagagatatgtatgtatactggcttatgggcaatggcaaatggtttggccagatggtcagggacttgaaatacaattgggaaattag

SEQ ID NO: 2661 - DNA, 2800 bp, Homo sapiens
  misc_feature (1)..(2800): DMR21:32298701
tctcctgcctctctgctctgtgtgctttggagttttatcaagaaggggcagatgggaagctctgctggatgctggcgttgtgagacacacccccctgacctttcttccagccaaatagctctgataagtgggcagaccttgagcctagagacccacagacacacttggacgattcctgcagaaatcagtgaggcagtctcctcccaggggcttggcgcctggctcgaggcgaggctgccggcccggacgctgactgcccagtgccacagacatggccaacgggaccaacgcctctgccccatactacagctatgaatactacctggactatctggacctcattcccgtggacgagaagaagctgaaagcccacaaacgtaagtctgaactagggaagccggtcagacagaggctgggggccggggcccaaatgactgggcactcccggctttctctgcattcacttattaactccggtagacatcatgggaaagcaggaatgtggccagttcactcatagatataaatgaatggggctgggagagaaactgtatttgctaacttctgtaataagcttggaattaacctgctaagtcacgaagacactttggaagcagaatttttattttttactttattttattttattttggagatagggtctagctctgttgcctaggctggagtgcagtggcgtgaccatagctcactgcaacctcgactgccctgggtcaagtaatcctcctacctcagcctcccaagtaactgagactatgggcacatgctaccacgcctggttaattttgtgtatttttttatagagacatgttatattgcccaggctggtctggaactcctggcctcaagtgatcccccaatctcggcttcccaaagtgctgggattacaggtgtgagccaccgtgcctggcgagaatattcttttaaagatagatttcttgtttaatttgtttggggctccaataagctgagcgagtttcctcaaattaaagatttgccttttccactgtctgtatttagatttgggacagttattctctccatccctaaaatgcagatttaatgatttttactaaaatgccaacatacgtttaatcttcatagtctcagcaaggacaaaccagcatgacttcacttctttttgctcatctgccctcgggttccttatctcttggctaacgtggcatgtgtggacaatcttctctgaggagtccagctacttgatcacaatgacaaattagatgcggaagtgagcatgagaaacaaaacaaaaacaaagcctgggaagattgggtctcagccctggaaacccatgcgctacctatcccgtaggaagtcttagcttccttgggttttcactcactataatcacatactgtctgtcaaacagtaaatgcagggctgggtgcaattgctcacgcctgtaatcccaccaactagagaggatcacttgaggccaggagttcgaggccagcctgggcaacacagtgagatcccatctccacacacacacagaaaaagtaaacgcagaccaggcatggtggctcatgcctgtaatcccagcactttgggattacgtcgtatgtcagatgcgtcatgtgtcatgcatcctatgtcaggggcgtcacgcgtcctatgtcagatgtcacacatcctatgtcaggggcgtcacgcatcctatgtcggatgcatcacgcgtcctgcgtcggatgcgtcatgcgtcctatgtcagatgtttcacacgtcttatgtcaggggcgccatgcgtcctatgtcggatgtgtcacgcatcctatgtcacgtcatgcgtcgcatgtcagatgcgtcacgtgtcctatgtcagatgtttcacacgtcatgtcaggggcgtcacacgtcctatgtcggatatgtcacgcgtcgtatgtcagatgcgtcacacgtcctatgccgggggcgtcacacgtcctatgtcggatgtgtcacgcgtcctatgtcaggggcgtcatgcgtcctatgtcggggcgtcattcgtcctatgtcagtgtgtcgtgcgtcctatgtcaggggcgtcatgcctcctatgtcggatgtgtcatgcatcctatgtcaggggcgtcatgtgtcctatgtcggatatgtcatgcgccctatgtcaggggcgtcatgcgtcctatgtcgggtgtcatgcatcctatgtcggggcgtcatgtgtctatgtgtcatgatatatcgtgtatgtcatatcaatgatatatcatgatttcaaagatgtatcatatttcatatatcatgatatatgatatgatgatatatcgcatatgtatcagatatatcaaatatatcatatgatatatatcatatcatatatccatatatatcatgatatatcgtatatgatatcatatatcatatgatatatgatggctaatttctttgtatttttagtagagacgtggtttcaccgtgttagccaggatggtctcgatctcctgaccttgtgatccacctgcctcaccttcccaaagtgctgggattacaggcgtgagccaccacgcctggcccaattaggatggattgtaaaatgtttgtgcttatgctctgatgtgtgatgtgtgggttagcaccatgcccttggtgctttctcatgatagtgagtgagttattaggaaatctggttgtttaaatgtgtgtgccatctcctctttcttcctcttgctctggccatggaaagtgctggctccccctttgccttctgccataatcgtaagtttcctgaggtctccccagaagcagaagctgc

SEQ ID NO: 2662 - DNA, 2000 bp, Homo sapiens
  misc_feature (1)..(2000): DMR21:34079501
tctcggctcactgcaacctctgcctcctgggttcaagcgattctcatgtctcagcctcccaagtagctgggattacaggcatgcgccaccagacccagctaatttttttttttttttttttttttttttttttagtagagatggggtttcaccatgttggccaggatggtctcaatctgacctcgtgatctgcccgctttggtctcccaaagtgctgggattacaggccctcttctctttatgtacaattccattaaccttcatgtggatgatttgccaccttttttaacaagctgacaactctggcattttctgttctcttctgtgctggttatggcctcctgggtatccccttggcactgcaaactcagtgtggttaagaacttaatgtgttgcctatccccaaagttgcctctgttattgcttatttctgtttatcgcttctctgtcttctgtcatctggggctgaacaaatgcagttctttcttttcctgcagtctcaatgccatatagtcttctctgccctagttgaactgctcatgttgtttgtttcttccttggactcttgcagtttcttagctggtctcctgacatactactgaggggaggatagctaatacctgtaaatacgcttgtagtgcaaatatatgtccttgagatactttaaaacacctaaataggtgcacttataacaaggaaatagtagaaagcattaagtgatggctttctgattcccatactaattgattgtatcaacacttgccaaattactgcatacttctcattttcaaatacatgcaggatgaagtcacatccaaggctgtctcagtatgactcccaacttatttttttaacctcatctttcagtttttttccacattttatatgcccagtaaacaaagttgtgcagattcttataaataccattaccttttattttctttggtgccggcatcatgctgtttttctgtttggaacaccctccctttccacaataccccaccacctccatgaaaaaccagtctcatgttcttccaagttcatcttaactcatttggtacattaaacaaatatcaagggcctgcaacattaggagtataatagactaatctttcctttggttgcatgaatctcatcacgtctcccatcacatggatcactttctactttgtattacagttaattggtgaatatgttttacctcctttgctagattacaaattcttgagagctgagtctttcatgtttgttctgctatgctttgcatatatggtagatacttactaagctgccttgaggggttactactctcatctctataaaacagttatttgctatgatacagcgtgttgacctcgtgctagtagtttgcttacaagtcagtgcacttcgctcacgctgggtgagttgtatgttaccagaagttgtgttgatttccaagactgttttatgacaggtaatcttgtttccgtaaaataatttaaatatcatgtgagctgatgaaatgagtgcaaacctttgtttcctgaaaaccaagttggattctttgggaagacttgataaaaggtgagtcattaaaataatgactgtagaattagatatggctgaaataactcaaagtttgggaagaaaaataactaggaggattgtgtatgtggagtgttttacaaggatcttttaaactttccactttaatgaagctgaaactggaaattgtagataatgccatctgtagatgtcgcttagatcaagcagaaggaactcaaatcatcagggaactccaggtcatcgattccattctccaagtgcttgtcatgacccctatattgaggttggcaaataaatgtatgtttatgtgttgaataaaatacttaataaaatacttaaggtacgtatatatagttttatgactggatatggctttgggtatgaaggcttctgctttatagaaaaatgctgatttttttgttttctattataaatgagtagaaaaaccttgt

SEQ ID NO: 2663 - DNA, 2900 bp, Homo sapiens
  misc_feature (1)..(2900): DMR21:35961601
tcaaggaaggctcccaagtctccttcttcagctgaaacctgccctgtttttccaggtacctgctggattcttcctcttttatgtcttgtatgcccccaatctttgttttgttttgtttgagacagtctcactctgtcgcccaggctggagtgcagtggtgcaatctcggctcactgcaacctccacctcctgggttcaagtgattctcctgcctcagcctcctgagtagctgggcttacaggcacacaccatcatgcccaaccaagtttttgtatttttagtagagacggggcttcaccatgttggccaggctggtggcctcaagtgatccgcccacctcggcctcccgaagtgctgggattacaggtgtgagccactgtacccagccccacatctttaaattacaaaatatccagaacaaaaccttctcaaaaatgccatttaaaactgtattattttcctgcacttcccatttacccaaagaccaagataactgagagttttcttctacccctgcttctccctttacccacactctcaattcagtcaccaactcctgataatttttttctcccaaatcttctggaatctgtttcttccatttatttccattctgacccagaacaggtgcccaaggtttcccaaccagactattgcaaaaaaaggggggccagactagtttgactgactctggtttcataacctttcaggacaacctctctaaccagtccaaaagtgatctttctagaatacaaaccaggccttgtttctcatttgtttgccctccaccttctgtgggtgggtgtctaaaggaatagcatgtaaaccatataaaccacagccttctcccaggccgcacctccagcccctctcctggcctctggccacagcaaacttctgccttcctctgggaaactctctctctcaagcctccttctctttgcacagggaacttttctatatgctgttcattcgctcattcattcagcaaatatttttaagagcctgatatatgccaattatcctttaactttaaaaaggatggtctggcatgccccagactacttaactcctagaaacttcgttgatgtaacagactcctgaatttgcatagggttgacctcccaccactggtacacaggtgtcttctaggacagtgtttcccaaccttgacactattggcatttggagccagataattctttgtttgggtagggggctatcctttgtgttgtagggtgtacagaagcatccctgaactctacccagtagatgccagttgctcacgtcaaccaattataacaaccaaaatatctgcagatgttcccaaatatcccctgggggttaaaatcatcccaggttgatgccctgtattagggcatctatgatacttgctactcccaggtcagtaagtccaattagcatgatgtcactaataggtgagacagagcaatgttctgcagaatgtcagcatgatcaagatccctgcagacatgcagatagtgaatgtatactgctatccttgccacggaaaggccaaccactgcagagtccccctattgatggaggttgacaagaaatcatttgccagatcagtagtcacatatgaagtttgagaaggcgtgttgctcttcatcagtaaatatagcaaacccagcacaacagcttcaaggggctatcacctaatagcatctgccatcatttatctggtttttacacggacacagtgggtaaactgaatggagatattatggggaccaccacctccttgcagctttgatgttcttgatgatagcaatcatatctgtacttcctcctggaatgccttgttattcctgattgccatcttgaataatggggaaagaacagtttccgatactttacttggcccttcccaccatagttccttactccataagtgggagttctgccaaccactaaatatatctaccccaattgtatatttggggacctgataaataaccacagggtagtttttggacccagtggaccaaatggacccattgtgaaacagacttggggtaaaactctatttatcaccagacttcctaaaactgccaatctaacgggacagggcaggtggggagggacaacataaggcatttaatattccttggtatcatttaagatcccttggtattgaagcagctatgttgtctggggtaaatacctagggtttgtcatctcacaccaggaaaatttaggacacagacacacatgaggcatttaggagcagaagtttaataggcaaaagaaaaagaaaggaaaacagctctctttctctagtgagagggagggaacttccgagaggaaaaggcccgctggcggcagatgcgccagattttatagtcaggcttgaggaggcggtgtctgatttacatagggcccacagattggttcaaggtggtgcctgatttacataggactcacagattggttcaaggtggtgtctgatttacgtagggctcacagattggttcaatcaggtatgatgtttacataccactggggaaggctggccacccaccctaatcttacttagcaaatgaaatttccccttggctgggtcatgttgtctgttccttactgtacacgtggctatcaaagaaaagggaagatggagttgctatcttgaacatgattggcacagctgccagcatctatgttggcagcttgattttacaggctgctctttgttagaaaatgatttggggctgcttttcattaaaggaaaaaccttaccgaggatttccgtaccctcactacctgcctaagtaatttcttcttaactccttatcagtatcagctcaaaccttgtatattactaatcctcaaaaagtctgaattgtccctattctctggcactagttacttgggga

SEQ ID NO: 2664 - DNA, 100 bp, Homo sapiens
  misc_feature (1)..(100): DMR21:40925701
tagccctgtaagagggagacaggtgatgggaataaagaagctagagtttcagggctgccatcacggtctggggtttcattgcaatattctgtgattttat

SEQ ID NO: 2665 - DNA, 1200 bp, Homo sapiens
  misc_feature (1)..(1200): DMR21:41043401
tacaggaagcatagaagcttctggggaggcctcaggaaacttgaaatcatgggggaaggtgaagggaagcaggcacatcttacatggccagagcagaaggaaggtggtgggggaggcgtcatacacttttaaacaatctgatgtcgagaactcactcactatacagtaccaaagggagatggtgctaaaccattcatgacaccttcaccccatgatccaatcacctctccctggacctgacctctaccactggggattacaattcgacttgagatttgggtggagacacagacccaaaccatagcatatggacaaggtgtacaaagcagcaagtcatgcaaattgcagctggaatagacatcctcctgtttgctccatccaggcagtaccctggggccccaggcctgtcctttctcttggtggatcagcatatttctccatgcataccctccttaccaccagttcagcactaacatccttgagggtataggccatagtacccatggccccgatacaatgatgatcacacgggaccctgtggaaagagaaacgacgagaatacaagcagcagagcctggatgctgatgggcaccaaagagggcgacaccctcaggcagctctgctgagcccgcccccacccagtgcaaaacaggtgactggtctgcactccgtgatttataaggtactttcatgctttgcaagctggggtccttgttcattacttgtaagtatctacatctattttctttgggccactttcttttctgtcatgtatctgtgaaagtttctgttctctctctctctcttcatgtaaaatcattctgcctgtcttctgtgaaacttctgtgatgcacgtagctcattgacccaaggagatgcatcttctcagagagggaggcatgaatatttctaatagataaatgtcctaatagagaaagttggccattacatctgccctataggggtagaaaaaaagcttcatgcaggtggtgacttttgctatgaaccttaaagtaggaaataggaaaatagctggagtatggagaaatacttggacagtaaaaagagaaaaggaagctaaacagaacacaaggggataggtctgattgaagacaaatacagcatgtggaacttcacaatcaggtgtgtgaggcccaggaaatcaaatggagaaggtataagacaaactacccgactcca

SEQ ID NO: 2666 - DNA, 400 bp, Homo sapiens
  misc_feature (1)..(400): DMR21:42245601
ctgggttcccatgtggtgtgagggaggcagggaatggcccagaaggctggatctgcaaacaggagtcgcatcagagacagagaagagagcacagctcaaggctgagataagaccaggagaactggggctgtatttccttatctattcctgagatccatgctttctgaaaatcatctgcacatctaagcatcttggcacaactccgatgaggaggggatggggcaccaggcagcagactctgatgaggaggggagggggcaccaggcagcagactctgatgaggaggagacagggcaccaggcagcagaaagtgctgactcagcagcacaagaccacatggccggcttcccttcttcctcggaatggcctggaattcgatcaagaacagcagccccaggag

SEQ ID NO: 2667 - DNA, 1300 bp, Homo sapiens
  misc_feature (1)..(1300): DMR21:42645701
caggagcctccctcggtccttgccctcagcaagtttattatagagtgggcaggaccagcactgttgcagcgcacagggtgggagccttggggacagccgcatggcagcctcccaggaggccccgggctgagggatttgcagcacgctcccatcctcccagttaatcctcagctttcgggttgctcgttgtcatcctcatttgataaatgaaaaatctgcggcttggggaggagacacaggttgtccagggtcacacagcaggcaccaccgaggcgtgctgggggtctcagggacccggggaggagctcctgggtctgctccagggatccagggattcaaggaagatgtgaccgtgtagatgacaccgtaacaaatcttaaagaataaggtgaccaaggggaggagaaatggagggacattcttctccaatgagacaatgtgcaaagtcaggaaagtgacaccagagaatctggtgccttcaggagtggggacaaaggctacagggaccagacaacagaggcaggcgtgccacccacccaggggtcctgaaaaagcctgggcatgccaccctgggggctccacaggaagcctgggcaggccaccctgtgggggaccatgggaagtccaggcagaccaccccagaggccatgagaagcccacatgtgccaccctgggaggccatgggaagcccacatgtgccaccctgggaggctagtctctaatgaggccaagcagggacatgacagggacggataagcaggagagaaagatccctggggaagtgcacgaggaaaggacggagggggaaggggaagctggagacctggaggccaccaaaatgcaccgagagaaggcaaggtggccctgacccatctgcttcccacagaggcacttgctgtccactagcgggggtcagggcaaccagcaagcaccccctcgtgaagcgccacgactcgacatcgcaaccgcaaaatgataagtacttgctcagccccagaaggccacggcaccactttgcgtctacaaggatctgttctttcctatccagccacttctgagaaagtgggagggtactgctttgtcctggctaattttctgtcactttcactccccctttctctgagtttatggcaaaaataacctcaccgctcaaattttttggaaataaaaaatttttaaaaagcctagaatcccaccactctaaacacttcatatcccaaatcatttcaactctgctggatttcacaaagcctgatgctggcgtgcaagctcagtggggcggggcggctctgtgcgcggg

SEQ ID NO: 2668 - DNA, 200 bp, Homo sapiens
  misc_feature (1)..(200): DMR21:42955701
ggcatctctgtgaagtctacctggagatcttcaaagggggctgctccataagcttgtatgccgggcggaacggctggcacttgcctcgcattacgctgtcggcagataacacaccgctgcgtcaccgttttggcaagtgctgacaaatgcgagacgtagaaataccggcctaacaacttttccagttgactcctgaccta

SEQ ID NO: 2669 - DNA, 2200 bp, Homo sapiens
  misc_feature (1)..(2200): DMR21:43934101
tgaggttttgagacctggatgctggagaacaggcagacatgggtgcccggcacgccagctccccgagcaccagctcccctgccgagcaccagctcccatatgccagtcccctgagaaccagctccctgagcacgccagccccccaaggaccagctcccacacaccagccctctcaccgcggtgtgcctgtccccacctcccaagggcggaaggaggggcctccaggcctcgtcttccttcactgtgcccatgctcagagatggtgacttcataagaggccacagaggctccgcaagtccccaggccgtcggctgcctggccctggcctgcgtggcagcgcaacctcgttggtagagtcaggaggctgggcctccactaggatgttatacaggcagcatggcttaggtgtcagagacgggaaaggacctggaagaaaagaactgtttcctttaggccccgtggggtaaccagaaggtaagactaggaggtgtgcgatggtgatggggcggaggaggggacagcgggaacctgtggaggggcgggctcaagccctggtcgtgagcaggatgacattcagatagctgggagcacgaggaggccacgtgcccatggtggaggagccacagcacaaagcaagccacgccatgccacccacgtgctgccatatcacatcacgccacccacgccactcacacgccacccatgccacccacaccacctctacccctcacgtcaccgacgccactcacatgccactcacatgccattgacacgccacccacgccactcacatgccacccatgccacccacaccacctctgcccctcacatgtcacccacgccactcacatgccactcacatgccattgacacgccaccacgccacttacgccacccacgctactacccatgccacccatgtgccgtccaccacccacgccacccacaccactcacatgccacacacagaaccagtgtggaggctggacagggggggcttctcacctgagagcgtgaggaagcagtggggagcacctggcaattctggagagctcagccaagtcaccaaagtgccgtgccgcgctagcacgctttgctgtgcgggcatcggttgtgtcacacactgggccgtgtggtggccttgcgtggtgagggagcaggaggcaggctcaggacacaccacaagagcaaatgtcagagctgggacccaggggcagcaccctccagtagcagcacccagatcccgcctctctccagccccggggaggctgagccggggtccccagctgggagtgcccccaggcgcctggccctggcaggcatgaagccgttcaggaggagggcagggccagcataggccccacaatgtccccacagtttttacagtgagaagtggccttagaggtcaagtccaggagcggcctgcagggcggcctctgcacgcagtactgggcatcggcgctgctgcggagctcggagagacctgaggccgggcccacagatgctcactgctcggtaggggcattctggggcctcagggctgggtctgcctggcatttggggagtctgttattcagacatggaaagggaacgactctcccaggaagggatttttttttttccttatcacgagaaaggcagtgacccaggcgtggggcaggaaggacaacctggcttcatcatcacaggcggccacggaggagctcagactcaggcccacagcacctcagctactctggagattaaggagtggagaagcctcagccagggctcggggcttggggcagtgccctggctctccaggtgcgctaagcaaacagatcatgccaggctttttccctgatggcggctcgagtcggaagccagagtgtagaacagtagcggagcccgcccagctgttcctaagcaaggcctaggccccactgcagggtcacacggaaggctcacatgccgcagccctggcccccacacctgcagctcgggcacccctggggacagccgtggtggtcaatctgctcacttcaaagagggggagccaaggccagagaagtcaagtgacctgccaggaccccagctctgcagcccaaagagtccaggactgaagcaaaagcagggagaggggaggacaatgcagccccagccccttgtgcctgacgtcacaccaggctggcaccaggcctccaaccccagccgggttcct

SEQ ID NO: 2670 - DNA, 1800 bp, Homo sapiens
  misc_feature (1)..(1800): DMR21:44158201
gttgtgtagacaacgccgtggccagaacagagcttgttctcgggcaaaaggagagtgaggaagctgagcagggatggcgtcccagaggcctcggaggccctgacatggtccaggaggccccaggaaggctcttgctgtccctaagcccagaggttttcaggggtctatgtgaattgtcactttttttctttttctttctcttttcctttttttttctttttttttttttttttgagacagagtctcactttgttgcccaggctggagtgcagtggtgcgatcctagttcgttggaacctccggcctcctgggtttatgtgattcttctgcctcagcctccccagtagctgggactacaggtgcccaccaccatgcccggctaattctgtttttgttttgttttgttttgttttgttttgtttttttaggagagatgggatttcaccctgttggccaggctgctcttgaactcctgaccttgggtgatccacctgcctcggcctcccaaagtgctgggatcacaggcatgagccaccacgcccggcccacatttcctttttttaattggtagaatctatacaaaacacaaggtttaccactttagccactttaaagagctcacttggtgtccccaagggcccgtggtgccaccactgccagtgcacaggcccggcccctcccccgccaggcctgtctctaaggccttgcccacccacccctccccctacccaggcctgtctgtctctaaggcccgctgtggccacacgtggaccccacaccctggagaacctgggcttgtccttggaggaagtaataacaaagagcccacctggtcgtggatcccagctctgcaccaatggccgtgagaccggggcccctgcctcagtttcctcatctgtcagtgagcctggaccagggtagtgaggtagtgtgggaggccattgcagtcctgggcacagccctgggggccaggagacgcctccatcagccgtgggcccaggcgctgccagcagcagggcagtccctgagggtctcccccggagcactccagacccccttcccctccggatccccgcacgcctccgctcctcagcagatgacaggccagctgctctcctgggctggttctgcagcgccgactgaggtgagggctcctgtgcaggtgacacgaaggagggatgtgcagatgaggggacaggtgaggggcagggcagggcctcccttaacccaccccctatggccctggcacagaggttccagtacctgcgctccaggggcagggcctcccttaacctgccccccatggcccaggcacagaggttccagtacctgggctccaggcagagtgtatctagcaccccagagaccgaggcgggctgtaccgttggctgctgggagcgagagccctggctgggtaggcaggggacggggaggggagagcatgaggggaccctcccagcagcctctgcatgcgggcagccggcctgccaccctgggcaagcgggaggggctgccttgccaagggaccctcacagatgaggtgtgagggacagagacccccgacggctgctggaggcacccacggggctccctggagcctccctgtggtcctgggtccccttacccgattgttgcaggaggggccagcacagggcaggtgcctgaagagcaggtgccggaagagctaccgcagcccaggcagcaggggaggaagtcagtctccctcgggggggtttccagacaggggccgcttttgttgagggcacagaatgtctccaaaaggtcggttcgttatcacga

SEQ ID NO: 2671 - DNA, 2500 bp, Homo sapiens
  misc_feature (1)..(2500): DMR21:45909101
ccagacccgccccaaccccactgcggcacggtgaccatcctgccttgccgtctgtgtgccctgccagcctgcccatccatttcagcgacgtctcctggtcctccctggcctggcctggccactttgtcctcggctgtgcatgacaggggctctgtgggcttctgagtgtgggaagtcaggacacaccccctgccctcctgctttctcactgcacgacgcctgaagtgctgccaacacacgtgtctctcccctaggatatcatcaactccatgagcaacagccctgccaccagcaagcccccagtgacgctgaggctggtggtgcctgccagccagtgtgggtccctgatcggcaaaggaggctccaagatcaaggagatcagggaggtaacaggaccttcccagcctgggccgctgcggagcctctaggcgggctgcgggtggtggccacaggccaggcagccttcctgagccttgtccctgctgtctgcaagcccaatgctggccacgcagaccccacagctcaaagtgcgagacaggaacacaggacccatgagcaagcacaactgcactgcagggacccagcccacccactgcccagatacggacccggccacccactgcccagatacagacctggcccacccactgcccagatacggaccccccccacccactgcccagatacggaccccccccccacccactgcccagatacggacccggcccacccactgcccagatacggacctggccacccactgcccagatacggacccggccacccactgcccagatacagacccggcccacccactgcccagatatggacccccccaacccacttcccagatacggacccccccacacacacttcccagatacggacccccctcacctgcttcccaaatatggacctggcccacccactgcccagatatggaccccccccaccactgcccagatacggaccccccccaccactgcccagatacggacccccccccacccactgcccagatacggaccccccccaccactgcccagatatggacctggcccacccactgcccagatacggaccccccccacccactgcccagatacggaccccccacccactgcccaaatatgggccctttccacccactgctcacctatggatcctgcccacccactacactcctatgggccgtgctggggacagggaggaactagctggtcacatggttctgggcaagggaggccctgggcactgggtgctgtatctactccctgtgaggggcctccagggcacctggagacagccctgagccatcggcctgtcccagtgggcagagtttgcagatgtgaacttcacatccacacgtttgtcccatttcaaggaaagcctgaatccttgccctatgcagcagggcagctgccccaatcttcatttcctttcccatgaccagagtccacctttctctgtgacctaaaactccacagaggagagaggattccgtgtatttgaaaagagtcgtttgtctccctgaaaatgcctctgattagatgcctccttgtctagccttggccaggtgccaagtgcgcccgagggaaggcacagggccgggtgccaggccgtggtagcaggggcagcatgggggcagtgctgggatggcggtgggggagggggcgcgtgggctgtatgcaggtttccaaggaagtgtcccccgagctgccttgggtgccgagactcgggaggtactgctgccccatgcgctgctaccctggtgctcccttccaatgtcccctctctccagtccacaggtgcccaggtgcaggtggctggggacatgctgcccaactccacggagcgagcggtgaccatctcggggaccccagatgccatcatccagtgcgtcaagcagatctgtgtggtcatgctggaggtaccgtctgcgcgccagggccagcccacgtcagtgctggatttggcctcccagcactgcaggcaaaggcttggaagccccggtcgccccaaggactcacacagttggggctgtggggggctcctgaccccaagtcagcctgagcgagagcggtgccggtatgggcgccacaggggtgctggggctgccagctcagggtccagtgtcttcgtgggggcgtctaggggagagcatgtggagaggagggagcctctcctctcatcttcggatttgggtaagaagttgtcatcccactgaggggtcttctgcactgagttggagctgcagaaacagtgctctttacgttggagtcaggccttggggggcagctgggggtgggagggaggcaaaggcaggaggctcctctgcgcatgcagttctgcagaaggaggcgtcaaaccaccgtggaggaacagaggtcaaaactcgggaaaacatacaaaactcatgcagaagtagagatgggtgaacaaaagcattaaaacggaaaagcagagaagaacccgctcagagcagacgcctctcttgaag

SEQ ID NO: 2672 - DNA, 400 bp, Homo sapiens
  misc_feature (1)..(400): DMR21:45930401
ttctgcaggaagccactgcgtatcccaaggtggcacccagccctgccccaggagagcagtgacccgagtcagccctagcccagtcgctgtcatgaggccatcaagggtggccatccgtggcaagcccaccctgcccctggcatgcctggcagttgggtgtccctccctgcagaggcagcgccatgcctgtggacaacccccctctccccctggcgtgcctggcagctaggtgtccctccccacagaggcagtgccatgcctgtggctgtggccagagagagcgccggtgcgtgcgccagtcatattttgagcttccctagttgaagggaccctgcttatctccttgagggcaaaacattaaacctgtctcttctttgctctccaggagaaaagctgcctt

SEQ ID NO: 2673 - DNA, 5700 bp, Homo sapiens
  misc_feature (1)..(5700): DMR21:46053701
acacacacacacacacacgcacgcatatatttggtattataccaataccacggtcttatttactatagctttatagtaagtcttaaaattaagtagtttaaaacatacaactttgttctaagattactttattcaaagccttttgaattaccatatacatattagaatcagctttttgatgtccatgaaaaagacactgattggcatcacattaaatccaaatatcaaagatttaatgagttttgaggaaaaactctaagcttaaaaagtagggtttcctaattcgtgaatacaatatatttctctactttttaggtctttaattctcagcaatgatttttagtacgcaatgtactgatcttgtcgtattttctttttttctttcttctttttttgagacagggcttctctctgtcgcccaggctggagtacagggatgcgatcttgactcactgcagcctcaacctcctggactcaagccattctcccccctcagcctccccagtagctgggactacaggcgcccaccaccacgcccggctaattttgtattttttgtagagactggggtttctccacctcatccagactggtcttaaactcctgggctcaagcaatccacccacctcagcctcccaccgtgctgagattataggcatgagccaccgcgcctggcctattttcttagatttatccctaagtaatacattttctttgatgctattgtaaggcctttctttgatgctacaataagtccttttaaatttctcattttccagttattcactttcactgccagaatatgcgatgggctctcgggtatgcagtgtgccagtcagccccaccctgacacagcggagcagagagagacggtcctgacggagcaggccagggatcagcaccgcccactgggcctctgacccctctgacccatgacctccaagccctgcggtcagtctgtgcccaggcccagtctgtgctggagccctccctgcagccccctctggcaggacttcagagggatccccagctcctggcccacatggccgcatctggcccaaacacacattcctttcgccactctcctctgaatggaatctggcttgccccgcacagcctctgcctccctctgccccgcacagcaccctccctccctctgccccgcatagaccctccctccctctgccccgcacagcccccctccctccctctgccccgcacagcccccctccctccctctgccccgcacagcccccctccctccctctgccccgcatagaccctgcctccctctgccctgcacagccccctccctccctctgccctgcacagcccctccctccctccacctcacacaggccccctccctccctctgccccacgcagaccgcctgcctccctctgccccgcacagggatcctgcaggttcagggtggagtggcctagcccaagccctcagcctttccttgtgagtctgggtgacttctgaaggggctgagaaccgcttagtggtctggaccctcccttgggggcttatgagccatcacacctcggtcctgccatggagacctccggctgacatctcctcagagcctccctggtgtccagagccccagcaggcagtgctaagccggccacactgaaggccaggaggcagcgcacggggacgctggaggagcacctggtgagctgggaggcgaggccctgggacgggacaagtagcagacgtctcagcgcacacaggctcctgccggacccggaggggctctctgttccatgtggtcctccagggattcgggctccttggccctgagggctctgcccacctagcaccttggggctgttccttgaaccccctgccccctagggtggggacaggaatacgtattacttagggataaatctaagaaaataggccaggcgtggtggctcacacctgtaatcccagcactttgggaggtcgaggtgggtggattgcctgagcccaagagtttaagactggcctgggcaacatggtgaaactcccgtgtagaccgtctctacaaaaagtacaaaaattagcagctgggcgtggtgggagctgggccgagggtcaggcctggaggtggtgcccatcactgggtcccgctcaagagagaagaggctgggaagccaggtgcagctgtgtgcccacaggcgggtgagacaggactgggcctggatcccgcacccgctcgccgcgcagctcagcgcaagcggcctccgggggcctcctctctgcaaggggagcgcgcgcccggccctgaccctgcctgctgattctctggaaggttcatgtccgggactcctcggtgaccctgggcagagccacccacatgcgctgcctcccctcccaccgcctgacaggtctggagatgcccagagacttctggcatccaccagcagcgaggagcgtccctcccgcaaggcttggcctttcccctccagctttggcacaggacgcgttggtctgccgtttcttttgtgcacaaccatcagtcatgatgtcagccctgagctggggccacagaaccctgagcaaagtgggacataatggaaagcaaacaaaaaagaaagaaaatgatggtttcaaactaaaaacctgagttcacatagcgatagatttaaaactattttagaaaacactcattatctccctggcctattttttattaaattgaccaaatctgtggatactcaattgcttgtgatgactgcaagcgcgcatccgagtccccagggaggcagcttcccttcgctcttcgccagcgcccctcagtcctaactttgaggagggcacacgtgagatttccttttaccaacagagaatctccaaatccagccttttaccagaagcctctccgagaaactggggtgagtaaatcgccgctgctgctgccaccttcagagaggccttgggcgcccgccccgacagccccacacggtcccggaactcgggccaggcaacgccctctcctccgtgcggggcttagtcatcgccgtgccgcttggcagtggtctgtggccccctcaaaatgtttccatttatggagagaacgtggccttccagatttgctggcacagatgggaaagctcaagcgctcgggcggcctcagggtttctctcaagggcagcagaggtcagggcctgcaggctggatggaagctccccgcccggcccgggggtctctgtgctgctgcgctcccgcccggctccttcacaaacctccaccaagtgtgggacgtgggcgtgggggggtgggcggtgcccaccctgatgggcactgtggtcgtccactggttctgtttgtttaaagtctgggcctgaaggcctgcatgtctcaccacacaggaccctccctgcccgtgacgggtggcagatggggtgtaggcagcccccgtgctgccccttccccaacccgggggtgcacttgtgtcggggctggggtggccgtagtggccctagatgtctgcagctggtgggcaaaggcaacacaccctaaacccacacctggccctcgggcccaccacggtgcacgcacccagcagctgaaactgcctggctcccccagcgtctctcccaggaccacagccccccagcgaccgctcagcacttctgtggcttcggcggcagcgcccgcggcttcctgtcactctcccagctggctgaaggcacagaccctcagcttccacaacccacaactccgggaggggattcccaaccacagacaggggtctttcccccgcaggaaacctcccacccttcttcaggctgtcagtgaaacggcagccacttttcaaaataacagtttctccctttacgtgacattaaagaggaaagcactctgccttcacctcagttccgtcgcccacacgacaatctctagggggctggggctgtgagtccccaccacgcaggtgcccagtgggcggggtcggggagggtggtgggatcgatggtaaggcttccagctttattccacgtctcccttgaagaaactgacttctgtgactggaaagatcgggtgctcctgcctagaaagatccaagccgtccaacgtacagctgggctttcatgttaaacccagggagtggggtctgatccctgctcacagcctgggcaggtagcaccgtgctggggagacgtccaaacgaaggtgctggggctcagctccctgcaggtgggtcccgcggctcctgtcccccgcgcgggtgatgtggcctcgccgtgttcccgatcggctccccacagaggctgcacgtcttgtgcatcctcagtgtcaaagtaaaatgtctgaaaagttaaaaacatgcctctctccaaatgcagggtaaagacacagctgagcctctcttcagcagggagacggcagggctggtgcgggaggggtcggaggagcagggacagtgaggcctcaggagagacactggggggggaggctgtggggcaaaaccctgcgccctacacagcagagaagctgagcccagcagcgcggtgcttccgtgcacctttcctagagagagacacgaaacttcacagaactggagccctgaatgaaccatgatgccaaacatgagcacacaggttcacaggcccaacaccccacaggcccacacagtcacaggttcacaggtccacacgtccacacacccacaggtccacacactcacagattcacaggcccaacaccccacaggcccacacagtcacaggttcacaggtccacacgtccacaggtccaacaccccacaggcccacatggtcacagattcacaggtccacacactcacaggtccacaggtccacacgtccacaggtccacacactcacaagtccacaggtccacatgtccacaggttcacacatccacaggtccacacactctcaggtacacaaactctcaggttcacaggcccaacaccccacaggcccacacagtcacagattcacaggtccacacgtccacaggtccacacactcacaggtccacacgtccatggtccacatgtccacacactcacaggtccacgggtccacacgtccacagtccacaggtccacagttccacacactcacaggtccacaggtccacacatccacaggtccacacactcacaggtccacatgtccacaggtccagcagtacacgggttcacacgcagtccacgggtccatgggttcacacatctacagtacaaaggttcacaggtacacagatccagaggtccacaggttcacacatacatgagttcataggtccacaggtaaagtggtccacaggttcagacacccacaggtccataggaccacacattcacaggctcacaggtctgccagtccacaggtccacaggtccacaggttcacaggtccacagcactaacacgacaagaagctggcataccataccccagtgtgatgctgaatggccccatctctttcccacttgcccatatccaagttttaaataacccaaggttacaagtaaggacaccaggacataaacacttccccgagccctattctttagtggctttgtcgataggctgtgtagacatggatgcccacctgagcccattgctcagtgtctgtatggacaggtggtgtggacatggaagctcgcctgagtccgtccctcagtgtgtgtgtgtggacaggtcgtgtggacgtggacgtttgcctg

SEQ ID NO: 2674 - DNA, 8500 bp, Homo sapiens
  misc_feature (1)..(8500): DMR22:11248401
ttgttttcactgttgttgcctaacatttattgttgcatttactctttctctctgttttccatcacataaaagtaactttgtgttctttatctcttctaagaaaacttggtaatgagcctttaatgtgacgactggaccacccttgttttgattttatgttatggatgttcttttatgtgatcgttctcatggagaatccttgtgaagctgggcttttccagtggtttgtcaaaatggaaatagatatttaacaaaccaaacacaaaatgaccttgttccaggaatgcatcatttctgagaaaacactacctcttccaactagatattgtgaatattactcatattatcttttactcccttttattaaaactgtatttttttacacttttgtgtaactcgggtaatgaaatgtgaaactaagtgattgcctaccaattacaattgatgttaatgatgctactgggaggccacccctacagtggctgcaccaagtctagggacatgctagctttgttaagttacatgagattgcctacgtactaaatggaggtggggcatgggtccgaggatgcggcggtgctgccctgccccaacatggaagctccggatggggccccaggcaccgcgtggcccagagccggaggtgggcacgcgatagtggacgacaccacagcgtccagcggatctccagcaggggcaagcgaaccatgggaccatggccacgagcactgccagacgggccgtgtggcaggcttccgggcccggacacaccatgacgtgccgggcgggcggggggtgggcagggggtgggcgggcgaggaggatggtgcctcagaggagtgttggggacgaggggcactggagctgcggtcagccagtcactgggccgcctccaggggtggacggtgaaccgcagcgactgggacgtgctcccccaccctctccccggtggacccttcctatttgccttcctcccaacccccagcaagcctccaccaccgacgacatgagacaacgacggcatgggaccttccaccccgccagggccaatgaaccctgcaccatgagctgcatgaggcatgagggagcccccaagggaggatcccagaccatgaaggtggccacaggaactcagccacagccggctatcttccctttctgttttcacaagtggcggtgctgccctctctctcttcctcacagccgggagccccccttccccacgccacccaacgcgtgaccacacagggcctgcggggggagggggaagggacgggcacagtgggagaggagggcggatgtcaccggtctgcacttggggggacagagggccctgtgggccctgccacagaacagctgggcaccccaaggagcccagaggcaaccctggggaattttgatcggcaagcgacgctcagacaggcatagccctgggaggaacccaggccacaagtgcattcaagtgtcgatgatcaatgtgtcctgcagttcacattaattctcccagctagctgcattcttcattgatgcaggagctgagtgatccaccactaaaagtcatacaaggttgatttggcgagggcactcccaacaacgggaggccctcctggcacagcacgtcccccagaggggttacctcaggccggccagtcagacagcaacgggaccagactccagagaggggttggaaggtttcacaacacagggaggtggtgccaaccacgggggggacaaaggctgacaccaccccatgggagcccaggggttcccgcccccacagtgcggggtacaggccacatgcaaggcatgtgtgacagcacgatggccgctgggtaaagcccccaccggcatcagcggcgacacgcaagtgtggcgtggcccccggctggccggggggatggagtcagcaggggaggcgagggaggggcgggcccctcctgaacggactccactgagggcccactgcacctgacccacaggcagactggcgaccccccaaggggtccttaaacctccgcaccagaatgcgctaggtacctggatggtgggggcggatgaggggggtgggaccggcgtccagccccctaccctcgagaccccctagcgggaaggctggggagagcaagcaggctgggccgggccagtggcatggtttgacagaggcgacgatggtggcagcggcagcgatgggaacctggccagccccaacgggagcgggcgggatggggccaagacagtgcgacagggcatgatgacggccccagtggggagggcaccgagacccccaccccaccatgacgccgagaaccacccccgcgcccaccgacgcacacatgggggccacaacaggggaccgctccccactgctcaccaggccggcgagccatccagcccaccccacgacaagcacacagtttcatccccacacgcatgtctctctctaccccctctctcccttctgagttctctggctctcggggcagatggggccatgcaacgaacaaagggcatgaccccacccatgcatgcgccacaggggaacacagtcagccaaggaggaaggacatggcggcatctccatggctttgctcttctctgttaatgatccctccgcaggttcacctaccgaaactttgttacgacttttacttcctctagatagtcaagttcgactgtcttctcagcgttccgacagggcagtgggctgacccggaggggctgatccgagggcctcactaaaccatccaatcaggagtagcaacctgcagtgtgtacaaaggacagggacttcatgcaagcttatgaccagcacttactgggaattcctcattcatggggaaaaattgcaatcaatgatcaccattgccaatgaggttcaacaggttacccacatctgccacatagggtaggcacacgctgagccagtcagtgcagcgcacgtgcagccctggacatttaagggcatcacagacctgttattgctcaatctcaggtggctaaacttgtccctctaagaagttgggggatgccaaccactcgggggtcgcataactagttggcatgccagagtctcgttcattattggaattaaccagacaaatcactccagcaactaaggccatgcaccaccacctgtggaattgagaaagagctatcaatctgtcaatcctgtccgtgtccaggccaggtgagttttcccatgttgagtcaaattaagatgcaggctccactcctggtggtgcccttctgtcaattcctttaagtttcagctttgcaaccatactcccctcggaacccaaaaacccaaagactttggtttcttggaagctgcccagcgggtcatgggaataacgctgccacatcgccagtcggcatcgtttatggtcggaactacaacggtatctgatcgtcttcgaacctctgactttcgttcttgattaatgaaaacattcttggcaaatgctttcgctctggtccaaactgtgccagtccaagaatttcacctctagcggtgcaatatgaatgcccccggccgtccctcttaataatggcctcagttccgaaaaccaacaaaatagaaccgtggtcctattccattattccaagctgcagtatccaggcggcttgggcctgctttgaacactctaattttttcaaagtaaacgcttcgggccgcaggacactcagctaagagcatccagggggcaccgagaggcaagaagcagggacaggctgtggctcgctagcccacccgttcccaagattcaactacgagctttttaactgcaacaactttaatatacgctattggagctggaattaccatggctgctggcaccagactttccctccaatggatcctcattaaaagatttaaagtggactcattccaattacagggccttgaaagagtcctgtattgttattttttgtcactacctcccgtgtcaggagtgggtaatttgagtgtctgctgccttccttgaatgtggtagccgtttctaagtctccttctccagaattgaaccctaattccctgtcacccgtggtcaccatggtaggcacagcgactaccatagaaagttgatagggcagacgttcgaatgggtcatcgctgccacggggggcatgcgattggcctgaggttatccagaggcaccaaagctggcggcacccgaccccccggccggggccggagaggggctgactgggttggttttgatctgataaatgcatgcatcttccccgtgaagggggtcagtgcccttcggcatgtaatagctctagaattaccacagttttccaagtagaagaggagccagcgaccaaaagaaccataactgatttaatgagccattcacagttttactgtaccggccctgcatacttagacatgtatggcttaatctttgagacaagcatatggttctgatagaatcaaccaggtaggtagaaagcggcctctgggactcgcgaggatgagcccggcgtcccagttgcgagattgggcgtggcagggcgggcgatggggcgtggggtagggagggaggagctccgggtggtgggaggggggtggtggggcggcgaaccggacatcccatccacccacaggacacaacaccccccgacgggctcaccactcccgacccttcgtgcccatgtgcgaggaggccaaccgcccgacccgtgtgcggcagccgtgagggaccagcggccactcatgcgcggagggcgctgggcggccccgacgtttgggcagcgaacgagaggcggaccgcggtgcctggggtctcacagccagtggcctccgagcatgaaggcggccccgagcggcacctggagtggccgactggccttccgcgggcctgcggctcccccaccaccgccactgtcgaggccagccccctgaaccctcttccctgcacgcactgctggccaaccccaaaccttccgggtgcccaccaggcccactcggggtgccgccgacctggtcccgaaggcgcacgcccggggacatggacaatgggccaaccagtggccggcggcagcgccacacaaggcggagccgggtttggtcccagacggggccaccacagcctaagccggtgagctgctcggggagagaggatacgcgggcggggaggggggcacagggaccatgagggcaagggcacctggaagcccgcagaggggcggctcggggagaaacctcaggcatggccgggccaccaggaaaacacggccacgggatcccaccaccacagacacgagggaggtcccgcagtgacccgcctaggatgccggatggccctcggcacccaccaagacccgcctcatgagccccgggtcccgccatcaggaccccgaggcgacctcagccacaaacccaacgccagggccacgttgctcgtttctcatccatcctccaacccggtcaagctccaggagaccgacatgccccccacttgggatgcttcccagggccaggtggcccaacctcgtgccacgcaaacgcggtcgtcggcaccggtcgctgctctgcaggggagcgggcagagagccggctcacagcggaatgggtcacaagctggactgaacgccaggcacagccaccgctcacgcagcctcccaaatgctaggacgccggcccggcccggcccggcgggatcctcccccgactcggaagggggaggcgcgggccacacagtaggcgacgagcttccctgggtccccaccgtggaggctggcggaacccttgctctccccccctcaccccatcaagggggcagtggaggagggtcctctgcaagccagtcgccacggcagcgctaccataacgcagagagaggcggcaggccgggggatccggtaccccaaaggcacacctctcagatcgctagagaaggctttctcactgagggtgagtcacagttcccacatgccagtcgcccctcgtcgggcccgcagaggcgcacagggacgcctggggaagggagggggcctgctgtaccaggaaaaatctgcgtgcggcaaccttgagccttcgcggtctgggcagggggcctggccgctgcacgtgtgcgcaatcccacaagggcccccccgtcgaccagcctcctttctcccaggcaaagcacctccaagtaaacccacacacaacctgtcggaggcagaacggtagcccctcggctgccggacggcgcacgcgtcatctgacccagcccaccgcaatagctcacacggcccgcgcgcacccgccagagaggagcacgggccctgcgctcgccagatcaggcagcactcttccccgcgtgggaggagcgcgtctcactcaaccgcctcaacccctacaccaacgagctccctcaggacccactcgtggacatcgcggcggtgaccggaggagggggcgctgagggtgggaaccacacaccaccgctcgacctcgggcacctgagggataagctgggggatgaaggggaggagccgggcttggtaggctcacgcctgtcatccctgcactttgggaggcaagggaaggtggatccctcgatccaagccttggcaacatggtgaaacctcttctctaaaaaaatacgaaaactaactggtttcataaactggactcaaagttaataaatagataagtaggccgggagctgtggcttacgcctgtaatcccagcactttgagaggccgaggcaggcggatcacgacggtcaggagatcgagaccatcctggctaccacagtgaaaccctgtctctactcaaaataccaaaaattagccaggcgctgtggcagatgccagtagtcccagctacttgggaggctgagacaggagaatggcatgaacccgggaggcagagcttgcagtgagccgacatcatgccactgcactccagtctgggcaacagagtgagactccatctcaaaaaagaaataataataatagattaaaattgaaaatttataaaaaacgtagctggcagggctcaaatgttcacgcctgtcatcccagcactttgggaggccgaggtgggcagatcacctgaggtggccagtttgagacccgcctgacccacatggagaaatgccgtctctactaacaatacaaaatcagccgggtgtggtgacacatgcctgtaatcccagctactcaggaggctgaggcaggagaatcgcttgaacacgggaggtggaggttgcggtgagccgagatggtgccattgcactccagcatgggcaacaacagtgaaactccgtctcaaaaaaaaaaaaaaaaaattaagcactttattctgttatttttacttcctacccagagaagaatataatacaactgttgtctgtctgcctgcctgcctgcctgcctgtgacagggcctcactctgtctttctcccagactggagtgcagtgacaccattatggctcactcactgcagcctcaacctccccagggttaggcgattcctcaagggatcctatggcctcggcctcccaaagtgttggggttacaggcgtgagacaccagcacccgacctgagttaatacatctggtctcactatgtcttaaccacacacccatgaagaactcaagtcaagagagagtttgtaagagactctcagcattctctcccgaaagcagtgaggtggatggcagccatgtgtcccgagctcctgtggttttaggtggccgtgcgtagaggagagatttccaatgtttccagagatgcgcgagccacagtcattcggggcatccgagcgcgagatgaggtttctgacagcgacttaagggccagaagggccagaatctgccaaggcaagtgtcccagggtggggccgatggaacccaaggtagagggagtcagcagtccacacagagagagctccagccttaggacccactgtgcagaccgaatcagaatgaagagagtccttcgtcctatatgccacatccctccactgaacttaagagtggatctgttttccaaacatgaggtgactctcactttgccatggatcacaaggggttgggctttccagagtcggcaggctaaagaagtcattctggctcagcctcccccatcccctggtaactggtgagtttatttattatttttatttttattattattatactttaagttttagggtacctgtgcacaatgtgcaggttagttacatatgtatacatgtgccatgctggtgtactgcacccactaactcatcatctagcattaggtatatctcctaatgctatccctcctaccttcccccaccccacaacagtccccagagtgtgatgtgccccttcctgtgtccatgtgttctcattgttcaattcccacctatgagtgagaatatgcaatgtttggttttttattcttgcgatagtttactgagaatgatgatttccagtttcatccatgtccctacaaagtacatgaactcatcattttttatggctgcatagtattccatagtgtatatgtgccac

SEQ ID NO: 2675 - DNA, 3900 bp, Homo sapiens
  misc_feature (1)..(3900): DMR22:11598001
tttcccattgccaccgacttcgtgtaaagtgtagtcccgaggacacgagagatacacagacctggccccgtggacacgctctgtgccacagcttccaccagacggacgggtgcactctacaagtctcggggcccacagcaccaaggagacagaaagaagcaaacaaaggaaggaccctatgaaacgcacccccaaagcaatcaaccaatccaagaaaaaaaaaaaacacgtctcagggctccgctggttttcccgcgtgggcggccctgaccccctgtcttagcctggcccaagcaccctccacctcaccccggcctgctcaaagtgccctgtctacctgagcagagcctccctctccaaggctccgtctttctcgctctgcaactccctcaccctctccctttctctacttccccctccacctctcactcttctgtcaccttctgtctctctccccctccaactttctctctctccccccatttctatctctccatcccggtctccctagctttctttcaagctgtgtctgtgtctttgtctgtatgtccttgtgtgtgtgtccgtgtgtgttcgtgtgcgtgtgtccatgtatccgtgtgtgagtctttgtgtgtctgtgtgtgtctgtgtgtgtgtctgtgtgttgtgtgtgtccgtgtgtgtgcgtgtgtgcctgtgcgcgtgcacccgtgtgtaactgtgtgtgtgtcggtgtgggtttgctcatggtggtggtgtggtgtgtctgggtgtctgtcagcccctctttcccaggatcaggctgccggggctctagtgccagcgcggggcaaagcagagccttcctgtcctgttggccatgggcgggtcctctttggaacaagcgacgatggtgtgggcgttatgagaaaaagggcccacggggctgggccggctgttcgcccctgggcagccctggcggactctgggtgtgtggggcaagagggggccttgcaagaggggcggcgagggatccaaatcaatttttccgcggcaaggcggaggaccagaggtgatcccaggactgtgggccccgggccctgacgcctccaagcacaccctgtcctgagccggcccgaagtgttggaagctcgggagctcacgagctgggggaaggcctggaatgtcagtgaaagggaggccgcctgatgtgccttgagcctgggcaggggactgaggcatcaaggcctgatgacggattcctgtttcctgcaacatgaggagtctccaaaatggcctgtttggaaacgaaaggagagtgaagacacgatgctgcttttccatgcttcgctggaggtttctgtgtccccacagagctcgggaaacaaacagtcaacatggtcacgctttcgggggccagagacacgtgagcaacagcccccccccccttgcagaaggcaaaggaacgtggaatccggaaccacggttcactcggcttgagtgtgactcctgtgtggatgggagtatctgccttgcgctctgttgtaggcttagcgtggggaggctcacatgtcatctgtgaaccatgtggatgaaaaacggacaacaattcgagtctcggctctgctctttggggaattcgcccattccttgggaggcggaattcgtctgaatcgctcccgggtgaagtaacccaggcgatcccgagggccggtgagcccaccgccagccaatgcggccgtgggccgagcactcagcctgcactgggcacccaacattttcccggagttcgaggtcctgctggtcctggtagcagaagactgcttttctctttgccttcctttctctgtttcttgatccttttctccctctgtccatccttccctctgttctttcttctctccctgtctccctctctccctgcttccctctgttcttctctccttccctctctacctccatccatacctccctttctccctccttccctccctcccttcctctctttttctttccctctgtccctccctccatcccttccaaggtccctcctttcatccgtcctttcctccctctgtccctccctctcactttgtctccgttcctttccccatctctgcctggcttccctcccgcctagaaagggcagaaccacggtttgcgcaagatctcggggtctacatttagttgccgggagctccacgtgatgtggcggggcatgggtgggcgagggagggtggagcggggaggtagtggagttgagctgcggaaaggagagcaggcctggccgctgcccgggccagtgtttcccggggtggaggtctccgcctataccactgaagaacgcgggggtcgtgggggggatgtgtaccgcgtggggaggcggggaagggatgagagccctgcccgggctggtcccaaaccctagccggctgcccatggacccgcgcatgcgcagtaggcggtccatctctgagtacctgggctggctctgaaatccttgggatgctcaggaaaagaatgacagccctcctttctgtggagtctctcgccggacctggactcagagatcctagacaggtcagctggaagggaagacacaggtctccataccgagcctgaggttcagcgtgaaagaggggccaccccctgcccccacccggtcccaaccccgcgtcctaaagctcctccagcagagccccgtgttcttcctggctgaggagtggttccagaaaagcgggatcttccatgtccttcaactcccccagtggctccgttgcttggaaaggttgtgccttttgctgaaattctggggtcgacaggagctcatataatagggtggatgcgagtgcagatgaacgctccagctcctggagcggttgggagggtgcctggatggcttacatctgcttctgacacgcagaggcctccatgggcgcgagctgcggaggtagatgtgcctcggcttcgcgttcccatgcgccctggcgacctggggaccctggccccagacccattacggactcatgtgggacgtgtgcggcacaagcacaccttgcccctgtgactcagcctgagcggctcaagttgtcccactgagcacgcacacagcaggccgccgtgctgcgggtcctggtccccctgccatctgttcgggtgcggaggtcacccaggtgtctgagggtgggacagcgccacttccgaaggagccagggcagcaaactcaaaatccccgagtgccacggcagatcgggagattctttccgcctgcaaagcctggctgggctgcagcagaggggccacccttgctgtctggctcacgaaagccccctgttccccacgccctggagtgggtgaaggcgaccaaggagggagggtggcacccgtggtgggccgcgttgcacaggcatcctgcgtgcgcgggttccctgccaccctggcctggatgcctcgaccttcgattctgacatgaaatctgaatcctggactccaaaaggcaggtctctctggacagtttgggtacgggttccgctcaaagcacgctagcagggaatcttttttgttcaggttacaaaccagtctccttcaccgtcctcgtcctcgggcttccgcggggaaggggctgtcagaaggtgtcgggagagccatcgcgagggcacctcaccggaatttcacggacagacacgggcagagagaggccggcggctcctgtgcgcctcagttggcctctgtgctgcacgcaggtccagtcaggagtccgaccccgccagtggcccttataaagacccatcagcttcaccccttcatgaatatgcatgagcacacaagggccctgggtaagccgccctccgaagccagaaaccacagacacagggccctgtgtggtaggcgaaggtggggccagatcggccaggaaaggggggcttctggggctggctc

SEQ ID NO: 2676 - DNA, 1000 bp, Homo sapiens
  misc_feature (1)..(1000): DMR22:11844501
aagaatcatcactttgcaaatatcatagtaataattgttgcaagaaagaaccttggagggatgctaagattagtggtgaatatatgttgggaaagaacatatttgcataatatgaaagtatcttcccacaagataattatagaataataacttcaaagtggagatgtcaacttacccaagtgatcaaagttaacattactaataataagataaatgaacttcatgtaacttcttatatgatgcactgagtaggacaaaacatcaattctatggtattcttagacaaaatgtataactttagtcctaaccgtgagaaaacatcagactaactgaaattgaggagggacattctacaaaataactgccagtattcatcaaaagcattttagaaagactgaggaattctccagagacatggaggcatgttatctaagtgcaatggagaacatgcattgtatcatgaaccagagatggacaacagtaggatatgtacaataacaccccaacatttgaacattaaacaaaatacttcagaaaaacccattggccaagaaaagtttcacacacaaaaaaaatagtttaaagtgaaagaaaaatttttaagaacttaataaaatgtgggatgcagataaatcgtttcttaaaggtacatttatagatgtaatatattgaaaataaaaggcttcaatcaatgacctttaggttcttttttaagaggctaaaaaatgagcaaagtatatccaaattaagaagaaggaagatgataaagataaaaatgtaaaccaacaacatagcaaataacaaaaggtggagctaattaatatacccacaaattggttatttgaaaaaaaaatttttaataaacaatggctagcaagatttatctcgaaaaaaattagagaagctacataatgtagataatgggaattaaatagaggatgtaactacagaacctacagacatcaatataattatgaaaactttaggccaatacatttga

SEQ ID NO: 2677 - DNA, 1300 bp, Homo sapiens
  misc_feature (1)..(1300): DMR22:14593301
agtgtctggaagtggagatttggagcgctttgatgcctttggtgaaaaagggaacgtcttcccataaaaactagacagaagcattctcagaaacttgtttgtgatgtgtgtacccagccaaaggagttgaacatttctattgatagagcagttttgaaacactcttgttgtggaaaatgcaagtggatatttggatagcttggaggatttcgttggaagcgggaattcaaataaaaggtagacagcagcattctcagaaatttctttctgatgtctgcattcaactcatagagttgaagattccctttcatagagtaggtttgaaacactcgttctggagtatctggatgtggacatttggagcgctttgatgcctacggtggaaaagtaaatatcttcccataaaaacgagacagaaaggattctgagaaacaagtttgtgatgtgtgtactcagctaacagaagtggaacctttctttttacagagcagctttgaaactctatttttgtggattctgcaaattgatatttagattgctttaacgatatcgttggaaaagggaatatcgtcatacaaaacctagacagaagcattctcacaaacttctttgtgatgtgtgtcctcaactaacagagttgaacctttcttttgatgcagcaatttggaaacacccttttggtagaaactgtaactggatatttggatagctctaacgatttcgttggaaacgggaatatcatcatctaaaatgtaggcagaagcactattagaaactacttggtgatatctgcattcaagtcacagagttgaacattcccttacttggagcacgtttgaaacactcttttggaagaatctggaagtggacatttggagcgctttgatgcctttggtgaaaaggaaacgtcttccaataaaagccagacagaagcattctgagaaacttgttcgtgatgtgtgtactcaactaaaagagttgaacctttctattgatagagcagttttgaaacactctttttgtggattctgcaagtggatatttggattgctttgaggatttcgttggaagcgggaattcgtataaacactagacagcagcattcccagaaatttctttcggatatttccattcaactcatagagatgaacatggcctttcatagagcaggtttgaaacactctttttgtagtttgtggaagtggacatttcgatcgccttgacgcctacggtgaaaaaggaaatatcttcccataaaaaatagacagaagcattctcagaaacttgttggtgatatgtg

SEQ ID NO: 2678 - DNA, 200 bp, Homo sapiens
  misc_feature (1)..(200): DMR22:15549001
agcaattttctgcctcagcttcccaagtagctgggattataggtgcccaccaccacactcggctaatttttttatttttagtagagacagggtttcaccatcttggccgggctggtcttgaactcctgacctcatgatccaccagccttggcctcccaaagtgctgggattacaggcatgagacattgcaccaggccaag

SEQ ID NO: 2679 - DNA, 1900 bp, Homo sapiens
  misc_feature (1)..(1900): DMR22:15853401
tatacttactatagtagacaaatataattactaatgttgttttctaaattttagaaaatctcagtaccacggagtgctatgaaatctatcagaaaaataaacagtatctttttatgtagtatttcattaagcttttacataattaaaatgccacaataggtattacagttctgtataatgagcattttatcaaattcccctagttctgtgcccctcaatctggcatatatgcaactatgacaggaggtactaaaagccttagataagcatggtgtatcttttttttttcccacgtatattttttgttgtttttttttttttctgttatatgtcctggttcttccataacttataaacttgatttataccgaggaggtgggaaagtgggcggggcagggtggactgacccgggatggggaagctcctctcgctgccccctcggggcgggcctaggccctttggaggatggggacgccaggacactcctccctgaggttgtctggccgcctctgcccctagtgctcagaatcctgcgtgcccctcaattccggaatccctcctgggaccccatgcccactgggcacactgcccctggtactcagaatcccgaagcaccattcggttccagaatcccctcctcagctgctggggtggcggggtccctcctttccgatgtcccccccaacccctgaggggggagggaagggaggggggtcaggtctcccctctgtggcagggggaggtggaggcggaggtggaatcggaagggcgtggaaggcgggggccaggagggctcagccgatggtgagtccaaagccacactggaacttgttcttgcggtgattcaggaaggccccaagggccagcgtcaggggcaggagctggagcttcttctccagcgtggcacccacgatccagttgctatccacagagcctttgaagaggaggttggccttgggcaggtccagctggtacccgaaggagacgctggtatcctgcatccttgtgctggcctgaaaatccacacccacctgcaactggtcactggctttgtggtagtatgttgcgtgcatgcccgcctggctcaacgttaacgttgccaaccagttgttcaatgtgtatttcccagctagagacatgacagtgccctcgtccccaggccgccggttgtagaccagctctctgcccagggccaggcaaggcctgatgctctggaggtagtgggcttcgagaattcttgaacccacgaggacgtctgggttccccagggtgacggctgctgtgagtcagagccccgatactccccgtccacctgccagttcacaaacttcgactgctgggtctggatggccatcttggacctgagaccggggcccagctggtgaatgacctgagcgtggagactgccgctgttgtccatgtcacctaccagtacagggaacgcctctgtgggactcagctgctttgtccccacatacgtgaccccgaagtggtagttggactccccgattgcgctgagggctactgtgtggttcacctggaaacggttactcaaccctttgttgactgtgagcttgacaccctccatctgaatgggaaacagctccttacacctccggtggcactcctggaatgtgcccgggttgggcaggcagccgcaggccccatcctcggcggcccctgaggcgctggcggttgcagccccgggggtccgttccgaacctcgactcctaggggtgccggcgcccaggccgcctctcagcggcggcagcgtgaagcccggcggcgagggcggaggtggcggccctgcgggcggcgagctggcggccaacatgttccccatggtcgctggcggtggcgcctgctcccggcctggtctccgctcccacccggtgcgtca

SEQ ID NO: 2680 - DNA, 100 bp, Homo sapiens
  misc_feature (1)..(100): DMR22:17593401
tggccacagcagctgcaaagaacacttccaatgccagcttaggctggaagcacttgctacagccactgatgaatccttaggagaacttaaccctggactt

SEQ ID NO: 2681 - DNA, 200 bp, Homo sapiens
  misc_feature (1)..(200): DMR22:17883901
ctcagaattctctctcccaaggtcacgaggaaacatgctagaaaaaagtcaacttgagacaaatgtgacaacagcaaacccaagagcgcgggtacccttgggtgagccacctaccacacagcttcagcgagtttcaaaccaaatcaacagtctcccttttaactttctcaaatccccaggagttacataaatcatgcaat

SEQ ID NO: 2682 - DNA, 1000 bp, Homo sapiens
  misc_feature (1)..(1000): DMR22:18185201
tcattagcgatgtcgtatacagcgtcataattagcgatgtcttataaggtgtcatcattagtgatgttgtgtacagcgtcatcgttagcgatgccttgtatggtgtcctcattagcgatgtcgtatacagcgtgctcactagcgatgtcttttttttatatatatactttaagttttagggtacatgtgcacattgtgcaggttagttacatatgtatacatgtgccacgctggtgcgctgcacccactaactcatcatctagcattaggtatatctcccgatgctatccctcccccctccccccaccccacaacagtccccagaatgtgatattccccttcctgtgtccatgtgatctcattgttcaattcccacctatgagtgagaatatgcggtgtttggttttttgttcttgcgatagttactagcgatgtcttatacgctgtcctcattagcaatgtcgtgtacagcgtccacgttagcgtgccttgtcggtatcattagcaatgtcgtataaagcgccctcattggtgatgtcttgtacggtgccgtcattagcgatgttgtgtacagtgtccttgttagcgacggcttgtatggtgtcctcgttagcgatgtcgtatacagcgtcctcattaccgatgccttgtatggtgtcctcattagcgatgtcgtgtacagcgtcctcgttagcgtgccttgtacggtgtcattagcgatgtcatatacggcaccctcattagcgatgtcgtatacggagtcctcattagcgatgccgtgcacggcatcctcgttagcaatgccgtgggcagcgtcctcgttggcgatgccatgggtggcgtcctcgttggcgatgccgtggacggcgtcctcgttggcgatgccctgggcggcgtcctccttggcgatcccgtgggcggcgtcctccttggcgatgccctgggcggcgtcctcgttggcgatgccctgggcggcgtcctcgttggcgatgccctgggc

SEQ ID NO: 2683 - DNA, 200 bp, Homo sapiens
  misc_feature (1)..(200): DMR22:18549701
ccttcttcctcatgaggtggatcagggtggccacgtggccagtcacagggctctcagccagggtccctgctggctgaggcggccactgttctccccggccactctaatgagccagggagagtgaactgggcaaggccctgggaacacatgccagggtgagcttcataaggtcaaggcagctggcctctgccctttgcact

SEQ ID NO: 2684 - DNA, 500 bp, Homo sapiens
  misc_feature (1)..(500): DMR22:20137801
gtgtgccaggcagggctggggagggtggaaggaagcctgggggctgagccactgggcagggacagggagagccctcccagcagagggaggtgtggccgcagctgtgtcctcaccctggtgtctacctccacgggctgggccctggacaagaggaagggtaacttgggctcccagccccgccgaggatggctgtcgtgggaagcggagtctttaaatagcctcttgctttccactaaaaatagtgaagctctgctgccgtggaggtggttgccggggcggcggggctggctcttggccaggcgggcgtgggtgcagcagcgtggccacgtgcgctggagtggtaggcagcgcgtgggccccatccactgctagtggccatagaggtcagggctgctgtgggggatccccactagccccccgactatgcagagggcctgggtgcagggagggacgcaaacccctgtgttcctgtccctgctgcttgtcacagcagctgtctc

SEQ ID NO: 2685 - DNA, 300 bp, Homo sapiens
  misc_feature (1)..(300): DMR22:20174201
gcttctacctgcacggtggccccaccacacaaggtgccgtcctgccctccagtcaacttcctggggctctgagcagcctgtggtggcacctcacctgggcagagggtgggaggagcagcgcccttccttctgtgcagggagtctgatcagggttctgtctcactgtgggacagtgggggccggggaagagcggcaggtaccaagtgcagacagcagatgtagatgcatgcgggggtccgggctggggccaagaacacagccctggagtcagggacaccggcttcatgtcctcactctgcc

SEQ ID NO: 2686 - DNA, 900 bp, Homo sapiens
  misc_feature (1)..(900): DMR22:20697501
agggacagggccacggcccccacaggatgaagcagcagcgtttattcaagatacaacagtgagggaatccggtcacgttcccttctccccagagagggcgcatcttgacaagtgatcgagtagaaatcttttaaactctaagttaagttcataaaaaccactggtttcactctgtctcccagggccaggcctggcctctgagatgcactggcttggggcgccctcaggtggctgcatggaaaacccacagtctgaggccagcctggggctttcagacctgggcgggatctgcccaggccacctgtccttctgctttgggccgctgtctcttggcagatggcctgacacctgggggtggcccaaggatgcctcagaaaatcttgattcccactctacagatagcctgattagccagaggtttccaggccatctgtccgcctccaggagatggactgggacctttagacatcggtggagaacaggatgctctgtcccttgctgtccggggcagggacggcctccagccgcaagaagtacagcagcacctcgacctgccctcgcggagtggggaagaggagagtggctcagaggggggctcacagctgctggtggggaggtctttggggcccaagtccccaagtccacctcaggtgctagaaacccctgctggtgtcatgaaccccttacagtgagacgggggtggggtggggtcctgacaaggcatgacttgttgggtggggggtggttatttattttagagatgcacagggccttgctctgtcccccaggctggagtacagtggctccatcatggatcactgcagcctctaactcctgggctcaagcaatcctcctgtgtcagcctcccagatacctaggattacagatgtgtgccacaat

SEQ ID NO: 2687 - DNA, 300 bp, Homo sapiens
  misc_feature (1)..(300): DMR22:20894701
gcaggatctaatctaagaggccttatgagccatactgaggagtcagaatattgcacttcaatgacagggaggtactgatggagtctaagcaagcgagtgacgtgacaagattcagattttgaaagatcataaagatgcatcaccgcattatttataaaagcaaataatggctggacgcggcggctcttgactgtaatcccagcactttgggaagccaaggcaggcagatctcctcaggtcaggagtttgagaccagcctggccaacatggcaaaaccctgtctccactaagaatacaaaa

SEQ ID NO: 2688 - DNA, 1500 bp, Homo sapiens
  misc_feature (1)..(1500): DMR22:21297901
aaaaaaaaaaaaaattagccgggcgtggtggtgggcgcctgtggtcccagctactggggaggttgagacaggagaatggcgtgaaccccgggacgtggagcttgcagtgagccgagatcatgccactgcactccagcctgggcaacagagcgagactccatctcaaaataaataaataaataaaatataaggtctcaggaacgtaaagattgacatttactcccaaactattaatatatgtccacccacctttcttgtagcaaaatcttaacttgacgtttgtttcaatagttattaaatttaattataatgtcctagcccaaaatacagtagaggtaaacatccaaggtactggcttgaggccactggccctgtatctataaaggagagggagaccatcaggggagggagggtaagaaagggaggaagagggcaaacaagttatcaaaaaacaacagtaggcagggcactatggctcatgcttgtaatcctagcattttgggaagccaaggtgggcaaattgcttgcactcaggagttcaagaccagcctggacaacatggcaaaaccccatctctacaaaaaatcggccaggcctggtggtgtacgcttgtaattccagctacttgggaggctgaggtaggaggatcacttgagcctggaaggcagaggttgcagtgagccgacatcatgccactgcacttcagcctgagtgacagagtaagaccctgtctcaaaaacaaacacatcagttattcatatttcagagtaaggacaaaacatttttaagtagctggcaaaggacatcactatatttcagagtaaaacaaataggaaatgcttatcatttgacatatttttaaacattgtatctgaaaagtgaacaaagaagtgaatgtgcttatgattaaattgactttgttactttgtaaacttgtagctttagacctgtctcttagcatcaccaagccttgatcttttcatctataaaatgggcatggtaatgccagccttgctatgtttataggtcacttaggaatgaggtatgtatggtgttgaccatggtttctggcaagtggcatatattcattataccatagctcttttcagaaagctaagtcaccacgtacatgttaatgcaacctgctgaaaataggcatggaaaaactagaaaatctagaaaaattagaaaatcactgaagaggattttctttaaaaaaatacatactttaaactcgggaggctgaggagggagaatcgtttgaacctgggaggcggaggttgcagtgagccaagattgtgccactgcactctagcctgggctacagggcaagactccattaaaaaaaaaaaaaaaaccagcaaaaaccaaacaaaacataatgcatgttctctcttataaatgggagctaaacatggggactcattgacttaaagatggcaacaactgggaactgctggatggggagggaggggaggggtgaaaggccaactgttgggg

SEQ ID NO: 2689 - DNA, 300 bp, Homo sapiens
  misc_feature (1)..(300): DMR22:22855101
actcacaccgcagagcccctagtccatctcctgagggaacgtttacgtttctattctgacagagagaagtcgccgtgaatggagtctttaccccaaacccaggagtttctgaggaacacatggggtcagccactgtctgtgtggggaggcttcacctcagggaggcgcccggctctgggctgagggggactcaacgtgcactaaaaggcaggactaaggcaagtcccgggtcacagtgtgagggacgcacgcgccctgaggaggggtccctggtgctaggcctgacccaattctaacccc

SEQ ID NO: 2690 - DNA, 400 bp, Homo sapiens
  misc_feature (1)..(400): DMR22:23477501
aacgcacatgagtcagaattcacagtattttaaaatatcgcagaatttaatttaccttatctggttttggtttcaagactatactagccatttcatttaattgtacatgtagggtattctaatttatggaaaactattacatctttcttgtttttttttttttttaagaaattacttctagggatctatatggtagagtccatggagaattgttttaattcttcattcatgtcttcagtgggtataggattggtcatattggtcatagttttgtgctcggatttcaataagaaacttgtggaagaacctgaagggtgggatctttgagggagcctaagacagagcaagacaagctaagaaggagggcagtgccacagcagaactgccattgatgccccct

SEQ ID NO: 2691 - DNA, 300 bp, Homo sapiens
  misc_feature (1)..(300): DMR22:24095101
gtgagacccctctgtctgggatgcctccttgagagtgctgccagcaggttctcacctgggtgaggggggccacttagccagggcctgcaatggcagttctcagccctcataccacccactgtgccctccaagtgggagcctgcctcacacccactcctgcatgagaagatcagggcagacctggttttaacctggccctgggcattcccggctgtggggccttgggcagctcttcacccattttaaattgaggaatgtggtaaggacttgaggaaatggaggaaagcacagggcccaatg

SEQ ID NO: 2692 - DNA, 1100 bp, Homo sapiens
  misc_feature (1)..(1100): DMR22:24493001
gcttgagaaaggaggtgaaagttcattcagtttgaagcattttgagttggctttgaagcctcttccatgagacctccaacaatttctctaagccagaaatcacctctttgcactccatagtatctttttcatctcaaattatttaaatctgctgtatttacaagtttgtctttcctttttttttttttttttttttttttgagacggagttttgctcttgttgcccaggctggagtacaatggcacgatctcagctcgctgcaacctccgcctcccctcctgggttcaagcgattctcctgcctcagcctcccgagtagctgggattacaggcatgcgccaccatgcccggcaaatttttgtatttttagtagagacggggtttcaccatgttggtcaggctggtctcgaactcctgaccacaggtgatctgcccgcctcggcctcccaaagtgctgggattacaggtgtgagccaacgtgcccagccgtctttactttaaatcacaaagaaaaggtactaggtcttatctgtctttatatggctctcttagcagtgccttacacatagaaagtcctcagagtttgcactcttgagaaggcagctccatcagatactagaaaccgtcagctaacatttatcaaaacaaggaacaaaacttgtgaattagcagctgaaacaaaatacctgaagtataatatttttaatgttagtagctgattctagatataaattagctccctttgtgctcattttacttgcctcttttttttttttctttgagattgcgtctcactctgttgcccaggctgaagtgcagtgttaagatcatagctagggagcctcgaactcctgggctcaagcgatcctctcacctctgcctcccaagaagcaggtgcgcaccaccatgataggctaatttgtaaaacattattttgtagatacagggtcttgctgtgttacccaggctggtctggagttcctggcctcaaacaatacccctttctaggcctcccaaagtgctgggtttacaggcatgagccaccgtgctggccttttctgacttttaaacaaccccgcagcgtaatctttgcattccta

SEQ ID NO: 2693 - DNA, 200 bp, Homo sapiens
  misc_feature (1)..(200): DMR22:26704101
aaaaaaaaaaaaaaattggatttcaaactttgtaaatgtattatctcttcaacaattaaattttcaaaataatttaagggagaaaatctttaatgaaaaaattttgagtttgaccttttttttttttggaaaatagagtgaacatggtagaaaaaataattgttgctgttattgtttattggagtttctctgatgtgcca

SEQ ID NO: 2694 - DNA, 1500 bp, Homo sapiens
  misc_feature (1)..(1500): DMR22:27238001
cttgaactcacaccgtaaaaaatacaaacatatgcacagatacatacaaacatacatatataaacaaatacacatgcttataaattgtgaccatgcactactgtattcatagattaagtaccatataaaacagacacaaagatgaaatttttaaaggaaaagttaactatatccagaagttctattaatattttttttctgagatgaagttttactcttgttgcccaggctggagtgcaatggtgggatctcagctcattgcaacctccgcctcctgggttcaagcaattctcctgcctcagcctcccgagtagctgggactacaggcacctgccaccacgcccggctaatttttgtatttttagtagagacggggtttcaccatgttgggcaggctggtctcgaactcctgacctcagatgatctgcacgccttggcctcctaaagtgttgggattacaggtgtgagccactgctcccggccaagttctattaaaattctaacaccacctcccacccctgggacactcaatctcctttatcctcctctactggtttctttcccatagaactatcaccttccaacatgtcatatagcttgttatttataacttttgcattccatggggccatgaaatcaggctggagggaagggaagaccaagtactgaacctctacaactggaggttcctcctcttaacccgtgtacttccccagaagcgggtctcaaacaagttcctgtaaaactgggaaaccaatttgagtgcattaagagaatgtgccgggagccatttggggaataatctggagacattaactcagaagtagattctgtccagagctgtatacgggtaattgcattgatcttacaaaaggagctctagagctctggagtatatatttaacgagacacagaatgtgctagccagacctattaggtgcagtcacatccactgtcttacttaatcctcacggctactcgaggaagtgggtcctgttaatattcccattttagagaggagaaaactgaggcaagtcactaagcccagcagtctgaattcaaacccatacctgtctgactccatgccatttccctgttgcaacatctctcagctgacacacgccagacccagtggctgtgttgggagctggcagggtctgtgtgtgtgggaggctgacatgttatagtctgggctcctgggcttgggcgttggctggggtccaggctctgtgtcagctgcagctggaggaggaagggcccactgatttagggcccatctggatggacagccgacaggaaccgggctgctccagacgcttggggagggtgataagcatggcccctgggtgcccctgcattcctggccagtgatgcttcagggtaggcggctgcgtggaatgcctcagtaggttttcctctccccacagccctccttgctgtctgtggcctcccaaggaccccaggaatcagcagtgaccctttgctccagagagctctgac

SEQ ID NO: 2695 - DNA, 200 bp, Homo sapiens
  misc_feature (1)..(200): DMR22:27565001
gaaagaattggctccatgccctgtgcccattgacaggtgagctggaattataggctggtggagagagtttgcctgtgggtttctgggagggaagtgaactacttatgccagccactctctccaccccccaaacacaccatcttccaagcgcatcttctgatgccacattccaatccctatgccaggtgggagatgtcctg

SEQ ID NO: 2696 - DNA, 900 bp, Homo sapiens
  misc_feature (1)..(900): DMR22:28342301
caaaaacatatctatcaactgaaagagagtaagctggatttccactgcatttaagatttatattattctgattaaagaatatatgttcattctagaaaatttaggaaaatataaaaacacaaccattgcccagagaccatcactttcatttttgcttatatgttgccaatattttctattctgacatatgctatttcacaaaacttgaaattcatctaaacttttattttcggcttaaattgctttaaaacagttattttgttacataattctcatagataaaaatggacaaagcaggataaaatatatatgtatgatacacaaaaaacggtggtatatgaaatgcacatacatacgcatatatgaaaaatcatgtgttaagagctcatctttcatacagatccaatcaaatttacattttagaactgaaatatcataattctaccaaataagcatatctacacagtatgtctaactcataagctcttgatcacattatagccacacaatgcagactaaccagacaagagaagctataataaagtataaaacattttccaaataagtctgagaaattaacataggcatgcacagacctagactaaaatttttattaggtccacgagaggaaattacaaacctttcaattcacatcagtctttgctactagagaaccaactactctcacaaaataaagtgaaaataaatattttcactatgaaaacatctagttggtggcagaagacaacatacacacataatgaaaaagtataacaccttatgaacaatgcatacaaaatgtattgatttacctaatattaagaagtatctccaaaatgtataatccatgaaattgtttaaaaatagaataaaataaaacacaacggagattagacagaa

SEQ ID NO: 2697 - DNA, 300 bp, Homo sapiens
  misc_feature (1)..(300): DMR22:30387501
ggcgccccctggtggccgcggagagctcaggtgcccgcggctgagggagctggagaggggcaaaaccggggtcgcagcgggaaggcggaaagtcagagagaggaggtgcttcggcagcggacgcgtcagcggggcagacaggaaaatagttggaaagggcgacctgggggagcagagacacgatcagagcctgagaagggcaggagcaagggatgtctaaggggcctggtggcaggcccttgttctgcggcagccccgtggacccacggggtggccagggccaagtcacatccctctctt

SEQ ID NO: 2698 - DNA, 1300 bp, Homo sapiens
  misc_feature (1)..(1300): DMR22:30465901
ccaggcctgtgagggctacaacaaaagtggagaatcacagcccctggcttcaaggagcagaaaactcagccagtaaagcaggatgagcacaaataaaacagctggagatccctaaaaggcagcaaacagggaaggctgcaccagttgccagtgccagaagcagtctggggagggagagatcatcatggacaggagaaataagggaggatccctgggagagctgggactggagctgccttctcttgcagtaaggccaaccctagaagttaccatttattgagaacttactctatgccaggcattctaagtgatttgcatacagccaagaaaccaacctgcctcacaacaatcctgggacaaagacagtgttatcaccctcagcgtacagatgaggaaacagaggcacaagtaagtgaagtcatttgtcacatacctttcacgatgagcatgaacttcagggtctctgggtaattctcttcaaggaggccaaagaactgtggaaccaagagagatcccttcagagagcacatcacatcttctcctacctccatctcctgtgcaatctcctgttgggaggtttcagatggctctggagggtttcccttcatgccatcacctcccctggcctctggagggaaccttctcacctcatactattataaccatactctaataataattacataataattgtttttagtaaatattataataatggtagtataataataatgactactgttgattaaatgttcactatttgccaagcagtgtatatacactttacataacaacttgctgaagtatccctacattgctatccccattttgtaggtcaggaaacaagcatggagagggtttggtggaagctggaacgtgtggtctcagtacagtgttgtccctgaaacccattctgtgggatcttctaggaaaggtattaaggccttctggagtttgagtcacaatgagggagcccaggacatttttaaactaaatcttggctctcagtaagcagctgggtcatggcaggccaagctggtcatcaaagcaagcggggggtggccctaggacttctccttacctcctggtacacttctaccagaggtttccagaagtgtttcagtcccaggccctcacagtcaaatatcatcacgatggtctcaatcttcttccctagctgcaaggatgagagcaagaagtagttctggagttcagggtgtaggcttgggagatggtaatccaagtacatgaccccttggggcttcttctagaccccgactctgtcctcagaggaacaagt

SEQ ID NO: 2699 - DNA, 200 bp, Homo sapiens
  misc_feature (1)..(200): DMR22:30504301
cgccttagtatcccaaagtgctgggatcacaggcgtgagccaccatgcccgactgacagccttatttctacaaggatccctgggagagtctgatgcaggccagctaggcggttttaggaatgttgtccctgatactgcatcttgagggtttagatttagaggcaagttaccaaacctctctaagcctcagtttccttatc

SEQ ID NO: 2700 - DNA, 300 bp, Homo sapiens
  misc_feature (1)..(300): DMR22:31780401
ggaaaagtcttttggatgcctgagtggaggaatcactggaggcagttgagtctggagttctcgtaatcacttctcccatgtgttgttccccactgccccccagtgtcctcgccacgcaaaccactcattgttccccaacatgccaccttctctcttgccaccatgtcttcgcacatgctgccctctgtatcctagggtgcctagaccctgcctttccccttcccaagccactcatccaggtctcagctctagtctcaggattccctgcttctggagagccttcctggtccaccaggctgg

SEQ ID NO: 2701 - DNA, 300 bp, Homo sapiens
  misc_feature (1)..(300): DMR22:32116501
ctttgtgcccattcatctcccctcattccttatttcctggtccagttattttatggacctcagtgaacatacatcaccagtctccatcttcacttttcatccctttcctcccctatgccccagagccctctgaaattattcaaactagccaatcctgcttaccttgctttatgcatttcttcccacaaaaccataataaatgctcttgcccatgtttttctcccattcccctgcctcctgagcaaccctggggcttccccatgtagatttttgtggtgtggcatgcccctttgccttggg

SEQ ID NO: 2702 - DNA, 3800 bp, Homo sapiens
  misc_feature (1)..(3800): DMR22:32203601
tccgcccccgataatgtcccatacacgctcctggctgtgggcagtgcagcccatgggtagcgcccccaaccagcccccagccatggggagtgatgcctcggataacacacccaacaagttccccaccatggcactgatgtcccaggtagcgcccccaatccttgcccctcagcgaccagtgcagccatggatagcgccctcaacaagcccctccactgacccccgccgctgtgggaaatgacgcccgggataacgcacccaaccctcccccgccatgagcaatgcaacacgcactactgctccttacacgccccccactacatgcggtgtagccaacgatggcgcccccatctccccctcgcctcgggcagtgtagctcccgatagtgcatccaacccattccctctgcccctctcctcccaccgagtcaaccaccgccggcagtccaaccccaaatagcgcacccaatccactccctgccaggcagtgaagccccccgatagcacccaacccgcacccccacccccgccactggcagtccgccccgataacgccccaacacgctcctggctgtaggcagtgtagcccatagatagagcccccaaccagcccccagccaagggcagtgacgcctcggatatcacagccaacaagttccctgccatgcgcactgatgtcccagatagcgcccccaacccgtaccccagcgcgaccagtgcagccacggatagcgcccccagcaagccaccccgcggctgcgggaaatgacgtccggtaaagcacccaaccttcccgtgctgtaggcagtgcagcacccaatactgcccctaacacgcctcccaccaccgggttgtagcccacgatggcgccctcaatccgcccccgctcccacctcgggcagtgcagctccagatcgtgcatccaacctgtccccctccccgccccctgccgcaggcagtgagccctggatagctcatccaccccgccacctttctacattctggctgcggtctagtctccctcaccgccaccaacggcagcgagccgagccatgctgctgcaggctttcaagcctccagcgtgggacaggtgactcctcctctaacctgggcatggagcagatgggctggcagacgcagaagtgcctggaatggcaagaacccctccccccacagaccgaggttatgcaagtaaggtttctggactacatgttcagattggatgagagaaaaacctctaggtctactctgattgtgctttattttcacgttctgactggatgacagcaagtcttaggataaccaatcagaacaagataacaaagcccgatcagagtaggcctagaggtttctctcatccgatcagactatgtagtcgagaaacttcatttgcattaaactcagtatataaaggatgccaagaggggtggcttgcccttccaggctcatctgcgtcggcctgcgtagctgctctgtgcccggcttagaggagaaggaggaggagccacttgccgcgcatgccagaggctagagtcatctaccgcgcatgctggaggctggagcctacagtggctcacctcgctgctgcggttggtggccgcgagggtgactacagcgcagccagaatggtgaaaaggtggcagaataggttcgttatcccaggccgtactgcctgtggcgtggggggcgggttgggggccctatccagggcgtcactgcccgtgttggggggctgcttgagtgtggtacctcgggcgtcactgcccgctgaggggagtggggtgggggcgctatccgggggcgctatccagcctatggctggagatgggttggggcgctatccgaagctgtaattcctgcggcagtggggagttttgggggcactatctggggatgcactgcccgcggccggggggcgggggtgagttagtagaactatcaggtgctgcaatgccctgatgcccttgttggggacaggttgtggggggctggtgggtgcaacactgctggtggcgagggtgggtgctgctatccggtgctactctgcctgtgggggacgggggcgggcgtgatatccagggcatcattgcctgcatctgggagctggttggggacactatccatggctgcactgcccacagtggggagcgggttgggggcactatttggggctgcaatgctggtggtgggggacgggttagggtcactatagggtgctacactgctggcagtggggagggggttgttgagggcgctctctgggggctacactgagacaggtagcggggggttgttgggattggtaccggggctggactgcccatggagagggggtgggggcgttggttgggggcgctattgagggccgggtacactgcctgcggtggaggggtgggttgggtgctatcaggggtctgtactgcctagcagggagcgggtgggtgtgctatctggggctgcactggctgcagcaggggcaggttgggtgcactatagggggctacactgcccttggcagggggtggtttaggtgagctgtctgtggccgcactgcccgaggtggggagtaagtttgggtgctatctgtggctgcactgcctggaggcaggaagtgggttgagggtgctatcctgggctgcttctcctggtggggagcaggtaggggcactatccagggttgcactgcccggggtagggggcgatttgggtgccatatcggggcatcactgcccacggcaggggtctggttggggtcgctacccatggctacactgtctacagccactgcctacggcagggagcgggttgggggcgctatcccgggctgcgctgcccaaggcagggggtgggttgcgggtgccattggtgctgcagtgtccgaggcaggggcgggttggggttgccatctggtgctacactgccagctgtgggggagggtcgggggcgctatcgggggctgcaccgtccccctggtggtgggcagcggaggtgtcagtgacagcggtggtcagaggaggtgagagggactccagtctctagagggccatctccttctgctcctggccagcacacagcatttctgcggggatcctgagcacggcccggcccctagacctgctgtggttcccaggcgcgcgccctctcaccatgtgttgctgagaccgtctgggacccctgggcacacagtagcggacatcatggagtgacagggccctgtgggtggaggtgtcaggaagaggtaccggcacttgggtggggagggctggctggggttgagtttctgctgcttctgcttcctgaggagcgcagccaggggtgggcccagcgattcgtgccgagtgggaagcccggacgctgtactgtggtgtctccagtccccaccccaggccccagttcctggtgaacttgggccaaaaagggaggctgggctttggagggtaggtgtgagtgcctttgctaaaactggcccctgccacctagtggccagcatgacaaggtgagactctaatgctaccactctctgcatcctgttctaggcttatctgactttgcctgcccagttgctccgtgccaggaggaggagccacttattccatgctggaggctggagctgggggcaccgcagctcaccttgctgtggttggtggtggcgatggagactacagagcaccagagcggtaggagagcagcaatggagactgcagagtgccagagcagtaggagggcggctggctgctgcctgggcaagggcaggcctgctgtggtatccaggtggtaggagccttgtagggtggaccagtg

SEQ ID NO: 2703 - DNA, 600 bp, Homo sapiens
  misc_feature (1)..(600): DMR22:33512001
tgtaaagccatgatttttttccttgttcttaaaaaagtcctgtaaaaaattaatgtcatagaacttcattatgagctaaaatattaaatttacctctgacagggctctctctgacattctggttgcagtataaagagacacttgcctcttaggaaggaaactgatattgtagattaagagaattcaaatcctttgacccaggaatcatactatgctaatttatattaaaaatgaatctgaaatagggaatgttgtatgccaaagaaattcaacagtctttaattaaatcttcaaaataccagaaacatcctaactggcccaaaataggagaatgtcttttaaaaaattatgatttatcactagatggaacattacccagtcaatgaaagtgacagttacaaagatcgataatattaagtgaaaataaaaggcagaagtcagaattacatataggaggaaaacaacagtctttaaaaatatacagaaaagtagattgcaagtaactaatcaaataatggtgggccaggcgcagtggctcacgcctgtaatcccagcactttgggaggccgaggcaggaagatcacctgaggtcaggagttc

SEQ ID NO: 2704 - DNA, 300 bp, Homo sapiens
  misc_feature (1)..(300): DMR22:34026301
cagctctgtggaagtcaagagggagaatgcaatgaaggaagacttgggaggagacccaatgtgatagattaattacattaatggttcgtattcctttctcctccctatatccacacggtaaccatgtaacttcgtagcgcgctcccactctgaatctcatgctgggtttagccatgttacatgctttgaccaatgggatgttagctaatgtgactcaggctgaaatttcaaaaaacttttatgtgattggaactgcttttgcgccttggctatcaccatgagaacattcttgggctcacc

SEQ ID NO: 2705 - DNA, 2600 bp, Homo sapiens
  misc_feature (1)..(2600): DMR22:35078001
ccgtcttctgtttctactcctctgttctccatattatttcatttcctgtattctggttccacaccccacattctctcccacagttctatagtcccatgaagacctcaactccctgctgtccttgacacctcagttttccaggtcaacctggaatcttcccttttgtaattttttttttttttgcagcttcctacagaactgcactatatcatttactatcatctaatatgctgactgactgaatgaatgaaggagtaaatccaatactatcaagcatggcttgttcattttgtactcctgcagactggccctcagtgcctattaggtgctggttacagagatgacattcactgagctcttggaatgaattaacacctgccatttctctctacatcaattctgactgacttcagctatatcccttaaacacaacaccagctctaaacatagaataaatatctttttttaaaaacccatgaagttaaaaaggcagtgtggacttagggagggaagggggtagagaaggagaggcagagatgaggctctcctacagaggtgggtcacaggccaataactcactctagtggggagtaatgttcaaagcctcactgcctgcgactcccaagaagcttccaaaaatccacaatagtgagcgaaagtactttgaaaggataaaaatggattaacaacaaaaatgagggctagtagaagggagtgaaagcaaaagcaaacttgaaatcccatttctacaactgaggcaaccgggcctggtggcttcccagagagaaatctcactagccctgtccctttcaccaagtaaacgcgttctgcaggcaagcctgcggtgagtgcttttgagccattcatcctccatcccagagacggaggattacaaatgtcagggtggattttgccttagtgacctgatcattcaatgcctctctctccctccattctactgatggggagactgaggcccagataatgaatccagaatgtggcacaagttgcatagtggaaccaggaacacagcttggattttctgatgtccagctcactggattttctactatccaatgacagcaggatcgatcataagcaccaagaaagaaaacaagttagttgatttcttcaagtgttaaaccctcagaagtgaaatctatttttcactgagtgtctactccaattcttagtatgtgatggctttacctctcttatttggggtaaaaagaaagtgggctgagtgggagtcagaagacctcagctggagctcagactcccacccctcctttgtagcagcttcagctcacgtcagtcatcctttctgatgtgtgacatctgacattgtacaaagttttagacgaatcctgtggaagtcttttctgtccaacaggattgagagcagagcctgaattctacttttatccatttaagacatatatttgttaagctctctcggggagccagttcctcagctggtctcagatacagtcagttacagtccctactcagatacagtccccaccctccaggggctcacagcctagagatggatgacagcagacatacgaggctcccttccctgggaggcttagagttctctgagcatgagtgtaagtgaccctgggacaagaagtacctcggttcttaattatttcccaagagcggtttttcttacaaggaatgtggaaaaaatcaggagaggcaaggtgttagctagaatggtaggaattccactgggccccaaaagtgaaggtgatctggggagagggtttgtgccttttctacaatccctaaaatcacaacacagggacaatctgcagtccaattaagacaaggattttaattctgtcctcagaagtccatggtcaggtaaacaaacccactgccaccgggtttggtccttcctccaatgtcctctgttacctggctccaaccaggagctacaggcaatgctggttgagtctcccattctgccaatggggcaatcttccttactctccattgtgtggccaggttcaaggaccacttttctgtccttatcataattggtctctctgcagcatggacccagctgactgtgccttctttcagtcctcactttcctcctccttcagaggcctccccttctcggtctctttgttgccttccctactgctgaacctctacatggtgaaggcaccgcaaacttgctcctgggtcctgtcctcttccccacctacactttctgcctatgtgatacccattcccatgactacaaaggctaaatagatgctgataggtccttaatttgaacctcagtcctcagttcccctttgagctccaaacttatcaatgcatcttcctattccatagcttcctttagctagccaataggcatcacacatttaacatgtccaagatgaacacctgatttccccataatacaaacacatgaacacacacacacacacacatcttttgctcaagccaaaaccaaattgttgtccctggtttatctcagccaaaagataatccatcaatctcacctgacagcctctctccaaaatatatcccataattagctctacacctccctgcaaacaacttcagcagcatga

SEQ ID NO: 2706 - DNA, 300 bp, Homo sapiens
  misc_feature (1)..(300): DMR22:35302201
ctcatcagaattcctaggagggcttgttaaataatgtcggggccccaaccccagagtttctgactctccaggtctgcggtgggactctagaatgtgaatttctttttttttctttttctttttctttttcttttttttttttttttttttttgagactgcgtttcgctcttgttgcccaggctggggtgcaatggcaccatcttggctcactgcaacttccgcctcccgggttcaagcgattctcctgcctcagcctcccaaggtagccgggattacaggcacgctccgccacacccgac

SEQ ID NO: 2707 - DNA, 300 bp, Homo sapiens
  misc_feature (1)..(300): DMR22:35397801
cctcggttgttgcctggaataaacggtaaacatttaccagcagccttgagttttctcaggcaggcaccttagcgggggctggctagagtcattttagagatgttagcagctgttagaaactgttagtgtttgtttaagtctttttttcttttctttttttttttttttgagattaagtttcactcttgtcgcccagactggagtgtagtggcacgatctcggctcactgcaacctccgcctcccaggttcaagcgattctcctgcctcaggcttccaagtagctgggattacaagcgcct

SEQ ID NO: 2708 - DNA, 1600 bp, Homo sapiens
  misc_feature (1)..(1600): DMR22:36747801
tgagagacgcgaggactccagggattgctaacccactagtgtcatgccagaggccccaaggcaaaggcgctctcagccagggcaagagaccgactgggctcaggcctcctagcccctgctgggcctctctccagtcctctctggggccatggcaagccactcttcccaggggtcactcaccggggacccaggcctcctagtcccagagctcctttggacgaagggtggagggcagcagactccacccctgggattatccaggatagggtcacaacagcagcggcaacaaccgaaacaatagggtgagcggcgagtgtcccactcagcaggggctggggggtctgcagctatcgccaggctgtgaaccctcagcaaacatctgaagtaggtgatgttagggcccagagaggcgaagtgacttgtccaaggccactcagtgaggtagagctgagcaaagactcgcacccagaggctgtgtgattccaaagccttgggtgccgcgtgcaggtgaaaccgccccacattgcttctcgaccgtcaccaccttctgcccctgagatcagcaagcacctgcagggaggtggttgggaagggcctgaccttcctctggaggtttcctgagattcacagagtctgacggtagctgtgacatcgctaggagcctgcactggggaacgcaggtcatgggcccattgcgtcctcagccgtaacgtaaaacagttgccttggcttcctggggtggctgtgaaggttgagtgagaggaaacacgctggaagaggctttgggggagattctgggagcacagtgtggctcacaggggttcaagcccctgcttgtaccttgcattcagcttgcccctgggcaaggttgctgctgttggaatctacaatgaggcaatgagccaggaggcaaaaaagactcacagatgtcgagaaggagcctgaggtcacaagaagcagccaagtgtcatgtcatctgtctggggtgcattttcttcttttgcgcagtgggacacaaacagccactttaaagagttgccatgtgaaataaaatcaagatacaatgtatgagctgctgatttttttgaaaataataggatacttgttcatgcaactttcttctttgcttaaaaacttcctttcatactgcaagaatccaccataatctagagggtacatgccttaaacaattttttaattgatatatcatagttgtacatattttgggggggtatatgtgatattttgactgtctgcttttaatttaaatgccatctgataaatgatatggtgaccaggggatttctggacttggcactatgaactcagtacagtccttatctcagagtatttgatgcttactgttggaatggcttggtcaattgaaaattaggtcatttgggccgggtgcagtggctcacgcctgtaatcccagcactttgggaggccaaggcgggcggatgacctgaggtcaggagttcgagaccagcctggccaatatggtgaaaccccaactctactaaaaatacaaaaattatccgggtgtagtggcaggcacctgtaatcccagctactcgggaggctgaggcaggctaatcac

SEQ ID NO: 2709 - DNA, 2100 bp, Homo sapiens
  misc_feature (1)..(2100): DMR22:38444601
tgtgtacaggacctagtgggagagggcatgggagacaggcctcagaaggaccagagacagcaggaggaacagtcagcccctgcccatgactcaatgctgggccacagccccaagggactgtcactgacagaacgcctgccatggggggggccacgggctgcatgcccctctttactgctgaccaccttcccactggctcctcaggccagagaatctccaactccagccgacccccatccatccatccattcattcatcaccctaaatgtcccctgagctggaacagcatctgccttcctgccaggtgccagatgtgtctcaacacagcgcagtgccttgccttggagggcggtctgtaaataattgagtgaacatttattgagcacctactgtatgctgaagggaagcaggtaagtcacaaaccggctttgctgagctccgtgcacgcatgtgtgcgtgcatgcgtgtgtgtgcgtgtgtgtgtgtgaaagggcataaagagaaggtcctaggaagatgagggcaagcaggagggcacaaggacagagcagggctgggcctgggctgagcggaaagcagggaatttggcccggcctgggatctaggccctggggagaggtggtggctctggaggagcatgggtgcctggacctgggtggtccactgagcaagggacaggcggctacttctgagggcaggacagcagcatcctggaagttgtggcacctatgtctttaggaaccaaacatccagggaaatcggaacctgagcatcagaacctctatcagggcgcctcctggatttctacacaggacagtagctttcaagttttttgaccaaaatccgtagtaaaagcaaacatcctgtttgttattttaacttactttatatttattttttagagacagagtcttgctccaatgcccaggctggagtgcagtgatgcgatcacagctcaattgcaacctcctgggttcttgccatcctcccgcctcggcctcccaacgtgctgggattacaggcgtgagccactgcacccggctatatatttaaagctgaagtaagagcgtcacaaaataatatttaccctcactacatgcatagtattttgaaattttctttttaatttcattttcggaaaacaagtagtgcaactcactaagtcaatttcccaacccactaacggggcaggacctgtgtgcaattttaaagcactggcctgagtgggggttaggagcggtgaaatgggatccggcgtgtgtcttgaagctgtgacgggcggtgcttggactccgggctttgtgacacacaaccatgtggggaattgttggatgttatgggggaatactgggaaaagtctgttagaccccccagctcacaggaccgccactctgcagcccaaataacagggactctttggggtctggttccaattttttccccgggtcttttaatagagccccctcctgccctgataacagatgccattcagcagttgcttacacatctcccaggacagggcgctcacccacttctcaggcagcccacttgactgtgaggagtaagctctgccgggctgctgatgtagctgctaagtggggccccgcccgtggctggctggccattctcctctgtcctctagcctgttgtctcagggagccgggacagctctggcaagtggtcctctctctgccccacccagttctctctctctgctgcccagccactgccgggtgtctgttgggggcagccttggagcccagccagagagaggccctttccaaggtcaggtgggctcaggatctgaagcctcatggcggggctggcactcagccagccttgcccaccaaagcagttctgggggcctgggtgagggagggccgggggaggctcagctgtccagagaagtggtaccccaaggcagtggctggtgatgggggtctggaaatcaggcccagcagtgcccttgagtggttgggtcacaaagtagttcatatcaacgagctatgatacattcattcactcacaggctcacaggatcttcccagtcaccctcagaaacagatgcaaagggccaggcacggtggctcatacctataa

SEQ ID NO: 2710 - DNA, 100 bp, Homo sapiens
  misc_feature (1)..(100): DMR22:38735601
ccccttagaagatcacagcagccagtcccctttagggcacaagaagccccatggcccactgctaccctccccgggacaaatacacacttttgtcgaaggc

SEQ ID NO: 2711 - DNA, 200 bp, Homo sapiens
  misc_feature (1)..(200): DMR22:42174901
ggcgggcgcctgtagtcccagctgctggggcggctgaggcaggagaatggcgtgaacccgggaggcggagcttgcagtgagccgagatcgcgccactgcactccagtcggggcaacacagcgagactctgtctcaaaaaacaaaaaaaaaaagccatttttttcaactagaaacaaaactttatattactgctccccctc

SEQ ID NO: 2712 - DNA, 2800 bp, Homo sapiens
  misc_feature (1)..(2800): DMR22:43401701
tgtgaggagaggaaggtctggggagagatggcagtgtggaggtggcagagccctgctggaccacagtgtggccctggtcagctccagacccagccctacagggacgtaattgcctctgggagcccagtgggtctttcacagggagataccagcttctgtggcaagctttgagataaccatccaaacttccagctgccattttgcctgtggggcacaggttctgggggcaccctgcaaggctggcagtccccagggctccattgcattttggggaaactgagtggtggacactggggtggggacagggagcaggaactccaggcctggcctggtgcggaggctgctttaccagtttgctgtatgcatgggtcagttcacctctttgttcacttatatgcccacagattgcctaaagttccttccagtctaatactctgggattctgggccagtttctggtctgtcacagctgaataagagtgcaagggcaggagtggaatgttcagactgctccaagaggaccttggcccaggtaggagtggcgagtggatattgtttctagggccaagccctcagaatggctgcctggagccctgtgcaaggattctagtttaataggaaagagttctgtgattgattagtgatgtctgctgtggacacacagtgggaggtatagagtttgagtagtttctgcactgcccctgcctgggctttttcttttgctagtggcactagaactgggtgccactccagccctaccagagactcaaggtgtgaccttgggtaagtccattcttccagcccaattttgtcatctgtaaactggagataatactgccatctttcctggtggttatgaggattaaatgcataatttgtgcagagtgaccagctcaagggggatgctcaaacatagcagctttgatctctgtgagtggtttgcagggtcagggtggtcaggggagtatagggatgggagtcaggagggaggctgagcgctgtccccttgggtgatggcctggggactgcacatgcacacatacctttctcctcccctctgctgcctgcagagtggtgtcagggagtggaagtatgtggaggttggggtcatgcagatctgggcagggttgcaatgcacccttggccaagtcattcagtgcctctgacctcacttgactcattggcaaaatagattctttcctgatgaattagatagtaaagtttatcagcagcctctgcagcctcaggtaataggcattaacaatcctggacagaaaacataaaagtttctttttagtcttgccctcacaccttgacctcctcttcaggagccatttatcctttcctggaatctgaggagagaatatttcctctcctacacttccttcttcttcagcatgggtctcagttttcctatttgtacagtggaggaatagagtggggttggagaagggcactgaggtccccaccaggtctaactttattcttttttttttttttttgagacagagtctcactctgttgcccaggctggagtgcagtggtatgatctcagctcactgtaacctctgcctcctgggttcaagtgattctcgtgcctcagcctcctgagtagctgggattacaagtgcccgccaccacacgtggctaatttttgtatttttagtagagacagggtttcaccatgttggccaggctggtcttgaactcttgacctcaggtgatccacccgcctcagtcttccaaagtgctgagatcacaggcttgggccactggaccttaattcaactacgctgttagaaaatagctggaaacatttggagtagggtgtgaatgactgccatggcagacacatgacactgcctagctgggttctgtgtcatccacaccctgctaagagctgcatttggcctgagctggtctggcttcctcaccttgaggggaaagagagactggggctcatccagagaagggcaggggtgtgcagccaggttagccaagacagctgcagggcaggctgtggagcctggggaggaagaggctcagggagttccactgatggccccaaggctccctggggaacccaggagggagctgagggtgctgtgcagtcctggaggtggagtgagaagcaaagggagaagttccaagctcaacagaagaaaaaacttctcacaggtagatgttcccaaaggtagaacaggtcccaggcaggggaaaagcagtgggcaaagggagcaggtggaccttgcaggaatgcaggggagaggcctattttctgaggagggcagcagggggcagctgcaaagtttgtctggtgctatttccccagcactgctccttctccccagctctactgtcccttccccacctcttctgtccctcccccacctctactgtccctccccagctctcctgtccctcctccagtcctactgtccctcccccagctctactgtccctcctccacctcttctgtccctcccccagctctcctgtccctccccagcttctgtccctcccccacctctactgtccctcccccagctctcctgtccctccccagcttctctgtccctcccctacctctactgtccttccccagctctcctgaccctccccccggctccactgtacctccccagctctcctgaccctccccacctcaattatcccttccctagctctcctgttcttccccagctcctctgtgcctcccccagctctgtgatctctcccaagttctcctgcattgtctccttgggaaagtgcctctcaccattggataatggcttccgttt

SEQ ID NO: 2713 - DNA, 400 bp, Homo sapiens
  misc_feature (1)..(400): DMR22:43734001
ccggccagtccccatttctttaagagaaaactgagtcttgacaaggcccaggagctactctgaggccctagaaccagggaggagagagcacagacttcacctccagcagcctgacttcaaagcctgggccatttctaccacaccaagagccgaatgttgatattaaatagaaagctgttagataaaagagaggattcaaaaatgcattgtttcttgctcaaaaataaaaaagacaaagttaatactgaagcagcttctccaggaaagagtatattcttgagcttcaataagaaaagcattaaagcaattgaagaaatggtctacttttgatcttctgtgtttctgagtctaaaagaaagcaattctattatgttcattttctcaagccttatcatgaaaa

SEQ ID NO: 2714 - DNA, 400 bp, Homo sapiens
  misc_feature (1)..(400): DMR22:44430601
cgaagggcttgaaccatgcctctcacagaagggctgatctaagaggcccatgctagtgttcaactctgacattcataagggggggaaagccagatgtgctcctaccagcccaccaggagggctaaaatcaaaagggccctcctctccgggccagggattctccatcctcagcctacttgtgccagaccgctgacaccacgtgtcctctcccaccctgagtatctacatcttcttattcacagactgttcaaagtcgggtcccaagttccttgcctgggaccattcgaccttcgggtgaaatgtagcaagtgaaaggcctttggtgcatggggaactgactgtccgtgccacccacagcaaatggggagctacctgccccaggtcccaggctgcctgccac

SEQ ID NO: 2715 - DNA, 1600 bp, Homo sapiens
  misc_feature (1)..(1600): DMR22:44955801
ccgtatgcatccccatctgtatcccattggttctgctctctggcgagccctgactgatgtgggtgcttagaattgagtcgggccatggtcagcactcaaagacgcttccgtcatattacagatgaggagagtggtgaggctgagggcacgcacttccctggcagttctatatgagccctggcccacgacagggaggcacggtgctttgtcctgggcacagcgatgaacaacacaactgtctcctcccaccccacaacgtccagccatcagcccgcgaggaaggggactgagccctccagcttgacgacacagcggtgggagcacaggggagatgctctgtgtgctctgcacaagcaacgtcccaccaggctggactcaatgggttggagatacaggggaaccaagggaggaggctccctggggagggggattttgcctgggggagaagctgagcaggaagaggaaggctatttggagagccgccccaatgctagggcacccagtctatgaggcagaggcccgacccaggggcccgagaatcagtactttcttaccctgacgagtgtatcttttcctcattactcaacacttaacggggtgacagcctggattaaacagtaagtcatctgcagccccattagggccccagcaagatggctccaaattaaatctaacagtcaatgaaatcgtcaatatttaatttactcattgcaggtggcaatttagcccttgtgacaatatcgtttaatggcagaaatactgggatttatcacacattatgggactgcagagctgccgagcttccttcacgaggcggctgctgcccagggagacctcgagggaccctccacaagcgaccccaggaggtctgaagcccaaggccagtgggaccatgaggcctgaccaccggaaaggcccaggggacctcttgctgggcccacccaaggcagtgctttctgtttctggaatccactttggaaacagaaaacttgggctaagggacagaggcccctccacgcggtgggctctccctcctcctccgacctccctcccttctcatcaaagctgtaccccagatgctcagggctgggcctgcagcattcaggagccaaccgagtgaagagagacaatggccacatccactcaccaaccacagggaaagaggaggcagccgtcacgcctcagtcctgggctccatcctcgtcccagccctcctgctggtggtgggagctgtacccagaggtcactgcccacacggcagtccaatggccacctccacctcagcaccgccccctccctcctccctctgagctcacagctgcctcgtcctgcgcattcttctgtacctgtggcctccctggctgtggacccacagcctctgcaggggactgcagtctctgaaagccaggctgagaacacagttgcacagtgctcacccagcctcagagggtcaggcaccggacggtgcactttacaacaattagctcttctggaaaaagttgtttcggttttttccctgatcctttgcatgaaaaaccctctgaaggtacaaagcaaattcctgaactgactgtagaaggagtgagagagacctgggctg

SEQ ID NO: 2716 - DNA, 300 bp, Homo sapiens
  misc_feature (1)..(300): DMR22:46369201
aatggtgctttctttggcaggaaacctttgcagataggacagaagtgactgtgttgatctgaaaacaaaacaagccgatcaatgtcttctctctcgtcactgcagacctccaactgccaaaagcgcctgaggcccttcgccctgtcagggaggggtggctgggtgaggaggacccgaaccctggcctgtggggcgaagcacacctgtccacccactgccccacagcgcccaccacacccagcctgcctgtgcgggaccctcctgggtgctggacgcagatggtctcatgcggacacgacg

SEQ ID NO: 2717 - DNA, 2000 bp, Homo sapiens
  misc_feature (1)..(2000): DMR22:46858601
gcttccccaccgattgtgggaggagacatctctcctgcagaagagcaggtggaccgagggggagcgctgagcgatacgctggcgggtgtgcttcgagcgcttcttgggagaggcggcctcaaccattccagatggaagggctaaggagagggaggacacccaccgctgagtagggtagaggagttattttcctaagaggatttgtttttccctctatgaattgggtgcgttcactgtggcaaattactaaaaataaaagaattctatgtgtgttgcacatgagtgttaaaactagcaaattcaaacaaaacaaaaatgatgagaaaaaaaagtcccacatgcccacgcgcagaccagaatccttttcgatagaggtctgtgtagtgctgtgccccttcccgggaccagaatccttttcgatagaggtccgcgcagtgctgtgccccttcccgggaccagaatccttttcgatagaggtccgcgcagtgctgtgccccttcccgggaccagaatccttttccatagaggtccgcgcagtgccgtgccccttcccgggaccagaatccttttttgatagaggtccgcgcagtgccgtgccccttcccgggaccagaatccttttccatagaggtccgcgcagtgccgtgccccttcccgggaccagaatccttttttgatagaggtccgcgcagtgccgtgccccttcccgggaccagaatccttttccatagaggtccgcgcagtgccgtgccccttcccgggaccagaatccttttccatagaggtccgcgcagtgccgtgccccttcccgggaccagaatccttttttgatagaggtccgcgcagtgccgtgccccttcccgggaccagaatccttttccatagaggtccgcgcagtgctgtgccccttcccggggccagaatccttttccatagaggtccgcgcagtgctgtgccccttcccgggaccagaatccttttttgatagaggtccgcgcagtgccgtgccccttcccgggaccagaatccttttccatagaggtccgcgcagtgctgtgccccttcccggggccagaatccttttccatagaggtccgcgcagtgctgtgccccttcccgggaccagaatccttttttgatagaggtccgcgcagtgccgtgccccttcccgggaccagaatccttttccatagaggtccgcgcagtgctgtgccccttcccggggccagaatccttttccataaaagtccgcgcagtgctgtgccccttcccgggaccagaatccttttttgatagaggtccgcgcagtgctgtgccccttcccgggaccagaatccttttccatagaggtccgcgcagtgctgtgccccttcccgggaccagaatccttttccatagaggtccgcgcagtgccgtgccccttcctgggaccagaatccttttccatagaggtccgcgcagtgctgtgccccttcccgggaccagaatccttttttgatagaggtccgcgcagtgccgtgccccttcccgggaccagaatccttttccatagaggtccgcgcagtgctgtgccccttcccggggccagaatccttttccatagaggtccgcgcagtgctgtgccccttcccgggaccagaatccttttttgatagaggtccgcgcagtgctgtgccccttcccgggaccagaatccttttccatagaggtccgtgcagtgctgtgccccttcccgggaccagaatccttttttgatagaggtccgcgcagtgccgtgccccttcccgggaccagaatccttttccatagaggtccgcgcagtgctgtgccccttcccggggccagaatccttttccatagaggtccgcgcagtgctgtgccccttcccgggaccagaatccttttccatagaggtccgcgcagtgccgtgccccttcctgggaccagaatccttttttgatagaggtccgcgcagtgctgtgccccttcccgggaccaga

SEQ ID NO: 2718 - DNA, 600 bp, Homo sapiens
  misc_feature (1)..(600): DMR22:47720601
gcaactgtgaggattctagcacacgtccccatgtagacatatgtttgcatttctcttgagtggatgctgaggtgtggaattgctgggtttatggcaagcttgtgtttaactgtttaggaaattgacagaattgtttccaaagtggctgtaccattttatagtcccaccagttaccaataagggttctagttcttccctcctcaccaatgcctgttattgtctccccctttgattggagccattctagtaggtgtgaaatagtatctctttggggtttttatttgcgttgttaaaatgtctgatggtgttgagcatcttgtcatgtgctttaaaccgtgtgcacatctgcaccagtgaacagtctatttgaatgtttccttttttaatgtttttagattgggttgttttccttcttattaatttgtaacaattctttatagagtctagatacaagtccattatcaaatatatgatttgcatgtatgttctccagtctttgctttgtcttgtcattttcttcatgatttcttttgaagagcaaacatttttatctttgaaggagtctgatttatcaaattcttttttatggatcatgctttt

SEQ ID NO: 2719 - DNA, 1200 bp, Homo sapiens
  misc_feature (1)..(1200): DMR22:48525801
ttctcgccttactctccccatctgtggacgaggcatcctgaggtcgcccctgcagaggcgtggagatgtgtgtggctcattccctccttactctccccacctgtggacgaggtgtcctgaagtctccactcccgctgccctgcctcccagatcgctgtcaggctggacaagggcaccaaatggccctcagtgcagatttggagaatgtgtactgggcaccagccttggcaggtttcacggatctctgcactcatcctttcctgggtggtctcagtcactgccaggggagccagtggcctcaccttaccaatggagaaactaaggggtgcatgcccatggccctgcccgggtgctcccagcatgaaggggctgtccagggctgggactccggtctggcctcattctctctttgtctaccctgctgccctcctccgtctgtgtgtggtgtcctgagctgggactatgccatctgtgtctttggggaggtcccctgcaccctggccaggagccgagggagctttccacctgcagggatccttcactgtgtacccttggctggctccaaaatccttctcaggggagcagagtgggagcaggtgccccagtcaagtcttccaggagctgtcgccccagacacatctgaatactggccacctggagccctcagagtccctggtccacaagggagagacgggctggcttctgcgtgccaccttgctcactcctggttaactctgcgtgccggcctcacaaggctgaccatacagggcggctgctggccccggagctcctgcgggtgcatcctcattggtacgtccttcctggtccttacaagaagagacaatgtccctgagtgcatttgcatgtcgatcacgctgccattatgtatctcggagttttcatcgtgagaagaatgagttaatcatgttgtatatactgaatagacttagaaagattgcaagacggcactttcattggaagaggggaattagtttaaaaatatgctgtcaaaatatgttgttctaaatgctgagttgatggttcttttgttttgctttgtttcttgaatgtgtcattagaaagaattaacaatgacatcaactgtgagatgggactgcatttcctctgaaagggggaggatattgagttgtccttgggattttctttaagtgattcctttcccttaatatattatatctc

SEQ ID NO: 2720 - DNA, 1200 bp, Homo sapiens
  misc_feature (1)..(1200): DMR22:48621201
cacccagccatccacccaatccacccacacaccaattctatccatctacccatccattctacctatccacccactcaccagccatccatccatttatccatccttccatccatgcacccacccatccatcatccatccctgcttccatcatttcatccacacacccacccatccattcatccattcttgtgttgggtgctccatccatggcatcagcagatatgcccagggcagcatggcacaggaacccccatgcccatcatgtaggtgctcatgggcacttctgctcactctggccggggtaggggctgttgggcccatgctttgtgaggtcttctcagagggcatcggcggttgtagcaggagcgagtagaagggagcctggtgtcccagggtgaaagcagggaagagcagctccactgagtccggctgtggccgcagagtggcccagcctgcggcatcaggagagcccaggcccgtggcctcggggtcttgcactttatgaagggagcaaggcagggtgtgacagtagcttcgtcctgagaccttgcaaacatacatgtgactggcctctcgaggtggggagtggtggccgaggccctgtgatgctgagagcccacgaggtctcagtgtcgctggggatggggagaagcctcagcccggagcagggctgcatctgcaggcctctgagcctggcacggtttgtgcctctggaggtggctggacccctgcctgtgtttctgttttcctagatgaggagtttgggctctcgctggctagtgaggctgagtagtgatggtgtcagaagccagggcccaggtatttcttgaaccatccattccagaacaacttctcacggcagtgcaacccctacaacacaccttcccttctcctgcaccctgagtgggagacgctgaaatcaccctagagcacaggagtgcatgagaacccaggggtaccgggggcccaccttgacaccatgtggtattcagggtcagaagctcccaaagttaccctgattgctctatccccaaaatatttatgtagccacgtttcagtgacccggaggagagggatacctaggacagggagtggctgtttcacatggggggcaggccctgggcacctcggagggcctggccgggcacctgcctatgttgcagaaaagcatctgccccagacgcttgttagaaaacagca

SEQ ID NO: 2721 - DNA, 3100 bp, Homo sapiens
  misc_feature (1)..(3100): DMR22:48701801
cctccctcccctgaaacacagtcccagcccgcactgggcagcgtcctctgcgctctgccctcctggagcccaaggtttttatgctgccactgacgagggtctaggtgcagcggctgcgtcatcccggggactggggggccttggagcgggagctggcctctgtctggggaggcagcttgaatgtacacacagaggggacctggggtggtggaaggagccaagcccttctgtagacctggggactcattgccagggagccaggtggccccggggatgatacgcatgtgtggttagtctgcaagagggcacacagtggacttgtgtgtgagtgtgtgtgtgtgcgtgtgtgcgtttgtgtgtggacatgtggctgagtgtggtatgtatgtgtgtgcctgtgtctacatatgtgaatggcatatatgtacgtgatggagagcatggtgtgggatggaagatggggctgactggcaccttagagaagtgtttccaggcagagaaagagcactgctggcccagggcctggctgggctgggactcgggggctgtggggtcctacagaggcttgagatcggtgagactctagatccagtctggacaaacccactctgagacgcactcctatgccccctttctatcctaggcaggggctccctggctcccttctccagccacgtcctaagcacctgctcctaccggcccggggacaggcactgcagacataaatacgcatgagaccctgtgccctttacgccccgtgccctttacctgtcgtgtgctcaggaccccccaggttagcccctgtggatgggtaatgacgtttgtctgcccagagcccacgtttcagtcaccgtcactcacgctacctcaggaagctctgtcagcccctgggcacgccgcttcccttccctgagagctattgcaacattgcgaccagaggggaggcctcctcacccgagcccggggaaagggagttgtgaaatgtatgcttgaaaggcccctttgtccccgggacatggtggcccggcgctgtgcctctgaccgtctccagcaggaagtgggctggggtgggtgagcccagctcctgccgtcaaacaaaaggtgttgtgtgctcagggccggcccgctggtgccctcgggagggccaggcccagggacggggcaggcctgctgcctgcttgtccctttgttctgcaaatgctgagagcaggcgagagtgtacatgtgggtgcatgtgcagatacatatctgtgtgtgtgcatgcatgtgtgtgcgtgaacgtgtgtgcatgtgtgcgtgtgtgctgcacctatagatacgtgtttgtgagcatgcatgtaaatgggcatgtgtgtgcctgtgtgtgtgcctgcatgcctttgcgtgtggtgtgtggtgtatacatgtgtgtgatgtgtacgtgtgtgtgttgtgtacatgtgtgtgtggtgtgtggccaggcatggcagctacagcataggcagggctggagccaccttcaccagcctaagtccccccggaccccgccgtccttccttcttctccttcaggtgaccctgagcaccaccgtgcatagtaccacatcatgtctggcagggatgagggtcctttccgtagacagccagtgggctgggccctggcactggagagggtgtgtgtccaagatgctgaaagctggcacatcaccccagatccctcccccatcctcagccccacagtcccagtgagctctggtggcttgcatcctagcctgaccgagagggccccaacaacacagcctgtaggttctggccagccgagccttgtgctgggtagtgcgctgtggcctgcgccgtatccaccctcagcgtccttctcccgggatttcccagcccagagcatgagcttcgtggtgggcatgaggtcccagctgagctcggtagtgaaggatttgggcccaggccacctcctgtccaccctctcacagcctgccctgcaggcaggtcaggacctgccctcggacaccacccacactgcccgggttttctggtctgtgccaaccccactcctgctggcccaggccctgccctgtgctgcagagagtgccagaactggcccgggcagatgcagaaacatctccctgttgcagttgaagggctcacttcacctgagacagcccagtccctgcttctggctgttagggcagaacaggacaggcactggggaccccagggggtttctgaggccccgttcagctcaagatgagagcaggagccacattgcactaaagactaccttgggcgccatggtacggggtggatgggagcccacgtggggatttcttttaagccacactggagcctcttcctttcatgtccttcagtgttggtgctagagaaacacaccctcaacacacacgcgcacacacacacacacacacacacgatgctttctgtaatttgtccagctcttttctcaggcattgcaaggggatttctgctactggggcatgtgtgtttcatcctgtagcttcctcgtgggtttaaggttcgtgtttgtgggtgtctgagattttctaccatatttactgttacccaacacgatgcatcagggatgggagacacagctgctggtggctttctgcaggaatagaacagacaagaaaaggggccccgggaagacgcatgacagattccggccatccccactcatggcgccatcccctctctcagcgctgtccctcggggttggtggacgtgcagcaggtggctgggaccctctgagggcctgggagctgcagcctgggtggcttgttcttcctggagtcgccctgggaagccggggggttccctatccccacgtgccatgttagtggcaaggagcacagttgctttttctcggagggagacactgattctcagctggagtttcctcacctgactcttcaggtgaacgagggatgttcccatgtctcctggtctcctggctgtctcagccggctcaggctgccgtagcaaaactccgcatactgaggggcttaaacaacacacgtttattttctcacggttctggaggctggacattcaggatcatggtgctgataggtttggttcctggtgag

SEQ ID NO: 2722 - DNA, 800 bp, Homo sapiens
  misc_feature (1)..(800): DMR22:49024601
aggtcccatggctcttgcctgcagtgcaggctccttccggtggccaaggtgcttttccagggagagcaccagggtgcatgcccgtggtgcagcgtcggagctggtggatgagagaaacctgctgttatgggcggggccccaggttggggcagagcagggatgtgtggagcctactctgtggctgaggcccaggcactttaggaaactttccacggcgccagagcacgagcccagaccccaaggggacccacatggagcagaggagctgaagctcctgcgtcctgggctcaggtgaccaccacatccaggtgtgcctgcggccttcccaacatcctggggacgctttagtcctggcaagcggggcggtgagtcaccctgtgcagggttcagggaggccccaatccccaagagaccgctccctccctggctgagccctggctcttccacaggggaaggcattgggttgcacctcgctggaattcagccctactcagcaggaaggaggagctcaggggttccccagaggtagtgccggtggggtgcctccctgctgttgctgtgatgtgggtgacagacaagctgggagctcagcagcccacagcagaacacgtgcaccgctgggcaactggggggcagcccgggagtggggagggttgggcagccaatgggggcagtggggtaagcaaggctgctcttcgcatcctgtctgggcccgtctcccccaaaccctgaggccagctggtttcacctcagtgctgagtgtctctcatcctccaagagcccaggcccaggacagggca

SEQ ID NO: 2723 - DNA, 1000 bp, Homo sapiens
  misc_feature (1)..(1000): DMR22:49621301
ttaatatgcctcttctaatttcattcataaataagtaattgcatcttaactcccatttgatagatgggaaagattgcagagctgggaaaacaggaattgttgcaccctttgggggaaaatcagggaggaaagagccaggtcggggctgtgggccctcgggggattctggggaagctgctgtctgtgtgtgttccccatggcccggtcacagagctatcctcacgggcgtggttctagtctgtgaacatgacccgtatttttgatcaattctaattataaatattaatcaaaaaggagaaggaaggcgaactccaggcatttgaggcaataggcatctggctgaagttgtcattagctgggtcactgacagccccacagcggccggccgaccacacaggtcagccacggtggatgccaggttccccagaccaagggctgccaggagcggaggcactcatttgcagccgaatcctcaggaaatgccctcagcgaaaaccagccacctccaccaaggtcaggtcgaccccgaaatgctggatgaatgtgcacactcgctggggcaccctcctcttcctcccctgcacaaagagcactgcagccgaaccccagcctcaggccacggccagcaccgcagagccacagggcagacgccgtgcacaccagacctgctgggccacagccaggcccgggtggtgaaggacggggacccaggcctcaggatggggaaggtggtggaggccctgctctgagccttctaagctggaggccccggcttaggggccatgcatggtcccacctttcgggtaacacctccccaccccagggcctgcccccagctgctcctgaacatgcctgtccctggaagtgcaccacatggaatcttccagaaggtacctgctgagagagggaagggacgtccatggtcctgcagggctgagagccgtcaagggagacaggcacagcacataagcaatgccagtgacgcaggagagcgagagcc

SEQ ID NO: 2724 - DNA, 4100 bp, Homo sapiens
  misc_feature (1)..(4100): DMR22:50216701
atgatgctgatgctggcgcagtcaaacccgcagctgttcgcgcttatgggcacccgggcaggcatcgccagggagctggagcgtgtggagcagcagtctcggctggagcagctgagtgcggcagagctgcagagcaggaaccagggccactgggctgactggctacaggcgtacaggtgagccctgcgtccatggtcaccgggggacggcgggtcgcgtgctggaaaaagtccagcccggctgtgactccagagcccggatgtcattccagagcccggctggacaaggacctggaaggcgctggggacgctgccgcctggcaggctgagcacgtgcgcgtgatgcacgccaacaacccgaagtacgtgctgaggaactacatcgcgcagaatgccatcgaggctgccgagcgcggggacttctcagaggcaagcacacgcctgtccctgtggtccctgggaggggggtcggccccagacccctctcaccctcctgatcctccaggtgcggcgggtgctgaaactactggagaccccttaccactgcgaggcgggggccgccacagacgccgaggccacggaagccgacggggcggacggcaggcagcgctcctacagcagtaagcccccgctctgggcagcagaactgtgcgtgacatgatcttcgtaacggcctcggcacgctccacacccctggagtctcccgaggcccccatgtgctgctgagtggccaagatgatgccaggctgccctatacactgggggattctgccctggcccatgcacacccgtctttccatgatggcagagacatccagtcaggacctgacccgtctctgtctgaggccggctcagcagtgcagcctggtccctgggggctggacccaggctcctaaataaaccagcaactccctcgagtctgtctctgtggtcattgttcccccaccctgccctgtcctcagcccccacccaggagagagagctgcagacagggtccgagaacacctttattgtgcacgtcccccgcagagcagcctcaggcgtcctggtagtagttgttgaagttgatgcgcagcagaaagtcctccaggtggggctggtagccgcggttcaccagcttggtcaccactggggaccagcgagcagctcaggcttttgcccacagtgtgagccccgccctggcccccccgcagccctcccagccagggtgggcctcacctttgaagagaaagtgggagtagtacttgaaggtgttgtaggactgctgcatgagtgcaaagttggggtgctctgcaccccgcgggcccccagggggcccccaggcctgggagatgagctggctgcggaacttgagcacgaggctgaagatgctgtggatgacgttcatgacgggcgccgccttctccgtgagcaggcccctggggggaagcagtgctgctgggtgggctgagccgtgaccacagggacgcagccgctgcccaggcctcacctgaagacggccttgtgcaggtactctgcgtgcgcacgctggatctcctccaggtcgcccacggtggccaacctggccctgaactcgcaccaggtgacgtgcaggatctggttggcgatgtagccctggatgaccttcacgaaatgctgcatctcgtgcttgaacagctgcagctgacggaactgcacagagccggccatgtggctcagcagggctggcggagggcagaaggcagagggcagaggtgagcgcagcctccagccaggggtgcggggcgccgggctccagcggggcctcacctgtgcgcttgaggtggaagcagacgtccttgagcgcccacatcatgagcttcagctgcagcaggaaggagaagacgccgctgtacttgctcacgcagccctcggtgatgacaatgttgagaggccagtccacctgccaggaggcgtggctcagcaggcatcccacaggcaggcaggcccctgtcccatcccccgcggccagggctgctgctgaccttgtacctgagctccaggcagctcagcacatccggggcgttgggggcaaacacctcgggcaggtacttgagagcgagggagaggttggaggcgtgcggggtgtccccatgcaggctgcactgcagggccttgctcagcacagagttcagcaccagcgggttgagcagctctccgggcgtttgcccagctccaagctaggcagaaaagggaccaccgtccccaggagtcccaagcacatgcctggcactcgccggcaccccatggggctgtgccagagcagcagggggctgtgggcgtgcagccagtctctcttttcccacggcctcccctctaccactggccccaccccgtgtccggaggccaccttctcaaagagcaggtcgctgagggactgggcgaactcgccgtcctccatcagcaggaagtgccgcagtgcctcatagtgcgcctccaggtgcagctccacgaagaagtagtcgacagcggccttgttcaccaaggagatgctggcaggagggagctggagtcagggcgggccaggacgggctgggtgggcagactggcgcaggggcaggggcactcactgggcggccagcggtgccgtgatggagcgcttcatgagcacgggcagcgtcagcaactcgctcagctgcacagcagtctcatcagcggcagactggacctgggggtccacggggaaggcgaaggcccggggaagcacggggcgcaaaagatgagcaatgggcggctcggctgcgggagatggagcacgcacgtgctgggaaccggccagcccagggctccgcccccatccacaggagatggagcacgtgctgggaactggctagcccagggctccgccccaacccacaggaggtggagcacgtgctgggaaccagccagcccagggctccctgccaacagcaactgctgcactcacacatggactcgtaactgtccgggtaccgctccaagtggtactgccctgccaggcctgccaggtaggcctgctccccaccctgagcctccgccgccgatgcctccgcctcctcaccacggcctgggctgctctgggcagctgtgtcttcctaacaaaacaccagcctcagaaccacctccccactgcacgctgtccccacaaccagcttgtgccaaaaaaaggaaaatcgcatgtgggacccacccgcgtgacaacctagagggacagagccctccctgcctgctgtgggacccccaggctgcatccacctaacctgtgagttgagaggccaatttggagagaggtcctcagtgtccccgctcctcccagggcctgtgtggacacaagtggacacgagggcatcagggccgagtgcctgtggcgggtacagagccgagccggccctggctcaagcagcccctcccatgtcccccacagcagcccaggtcctggctgacaaggaggcctgaggggaacttcacatgccaccaaccccactgcccgcctacctcccaggctctgtgcgtcccacagtcccactcctgaccaccagccaccctactctgacctagttcttcagagacactgtctcccggggtgttgggccaccatggttgggtgggagccacgtctgacacgttctcccccacgctgatgctcccctccccgcagcccgagctgggggaggacagagatggccccacttctacaggcagccgtggcccacagtccagcacagtgctctgtgctcccaggctgagcgctgactgggacgtgtggccaggggggctctgttggggcctgggtgtgttgggctcagcttctggtgagagagcccccagcaccatgtggggcggagggatgggtacatgggtgttccaccgtggccgggtggaaaccacatccgacacaggctcccccaagctgatgctggcgtcggacacgtgtccatgggtgttgcaccgtgaccggatgggagccacgtccgatacgttctccccaaccctgatgctggtgtcagacacatgtccgtgggtgttccaccgtggccgggtgggagccatgtctgacacagactcccccaagctgatgctggcatcagacacgtgtccatgggt

SEQ ID NO: 2725 - DNA, 400 bp, Homo sapiens
  misc_feature (1)..(400): DMR22:50629701
tttctgtgaactcagaatgcagaaaagtttttctctaggctcctacagttttggtgcagtcggtaggataactaaagtcactctcctgggagcctccgtcaggggaacccaggagccgacaagctggcagaaagaagggtaagaaggtcttagcagccaggctcccggcctctctggaatcttgtcaagccgacggtaaaaatgtctgtttaccttgttttcctcttcaaagttttaatgagagaaatgtatttatgtgattagttttgtattcatattgtttgattgctttttttccccagaaatagtcgtctttcattcttgtctttctgtgtttttctgtcataaagagggtagaacacaggcctaaaacccctgtaaaccccgtcttggggccgtc

SEQ ID NO: 2726 - DNA, 1000 bp, Homo sapiens
  misc_feature (1)..(1000): DMRX:666401
tgcagccacaagcccagggatgcctggagcccccaggagctgggagaggcaggaaggatcctcccttagagtctccagagggagcacagccctgagactccttgacctcagactcctggtctccaggactgggagaggcaggaaggaccctcccttagagcctctggagggagcatggccctgagacacgttgacctcagactcctggtctccaggactgggagaggcaggaaggaccctcccttagagcctctggagggagcatggccctgagacacctggacctcagacttctggtctctatggctgggagaggcaggaagtctcctcctcaagagcctctggagggagcatggccctgagactccttgacctcagactcctggtctccaggcctgggagaggcaggaaggaccctcccttagagcctctggagggaacatggtcctgagactccttgacctcagactcttggtctccaggacttgacggggatgaattcctgcggcatgcatcgtcattcctggtcctttgttacggctgactcaggaatctaagaaactgacctgcggggttttgcccatcaggatggtggcttctccggctgtggatttgttgcttttccatcttctctgcggctgacactcttacggggagtaatggtgcagagaatttcggttgcctcccagagctgcagccggaagacgcaaggaccaacgaaaacatttgcatcgtggctctctgtgaggaagagtcctgctgtgaaagcatttttattccgaaagaggatcatctttgggagcagaaccatggaaaagtctctttcggcagcccacggaatgatgggccggccacattttggatacatctcatgcttcttactgttttcaaatggttttggcttgaatggaattccaagcccattttttttttcctctttcccaagtactttttgttcttgagtcttgcaatcctatgaattccaagggaagctgaatgt

SEQ ID NO: 2727 - DNA, 9200 bp, Homo sapiens
  misc_feature (1)..(9200): DMRX:1041801
tctatctatctattggtctatctatctgtcaatctatgtatctatctatctatctattggtctatctatctatctatccttctatctatccatccatctatccatatccatccatctatcatatcaatcaattgatctatcatctatcctattatgtatcaatctatcctccatctatctgtccatctctgtgcatctatcctatcgacttatcagtctatccttctatttatctatctttctatgtatctccattcatctatccaattgatctatcaatgtattcttctatctatacatctatctacctacctgcctgcctatctattttatctaatctatctatccgtctatctacccatctattatctttatctatctctatcatccatctttctatctctttatctagctctctatcgatctctttatctgtctatctctttctctatctctatctatctatccattcttctgtcagtttgtctgtctgtccctctgtctatccatctatctatctatctctatctgtatctatctatctatctatctatctatctatctatctatctatctcttcttctgtccgttcatgtgtctgtccatctatctatccatctatctatcatctaactatctgtccatccatccatccatccatccacccattcatccatccacctatccatctatcaatccatccatccatccatccgtctatcttatgcatcacagctggaccatgcagaagacagagggctgaggaatgggagcttctggtgaggtctgtgggtgcagccatgaacccctccagttaatgtgactgtattggggagaactggcaccactgagggggaagttgtagctgtgaagagtgcaggacccagtggttgttgttgaagaccacctgtgtacgatctgaggtacagctggaacactcgggtgacgagttcctcactgaaggtcaatttggaccatcccaagagtccccttggcagcacagagagatactgatctcccacagcaggtgcagagaaagtaaaagaccaggaacaaagtgtgctgggcactgtctgatgtcaaaccccagctaacgggcagtatcaggacatgatggacaccacctcaagacgtgggatggggtgtcctggtatctgcaactttgagagctttattttattttattttttgagatggagtctcactctgtcacccaggctggagtgcagtggcacaacctcagctcactgcaacctccacctcctgggttcaagtgattctcctgcctcagcctcccgagtagctgggataacaggcatgagccaccatgcccggccccagcttgggttctgaatccttcaacacagactctttctgagaaaaacaggccgggcacagtggctcatgcctgtcatcccagcactttgggaggctgaggctggtggattgtctgaggtcaggaattcgagaccagcctggccaacatggagaaaccccatctctactaaaaatacaaaaattagtcgggcatggtgacgggcgcttgtaatcccaactactcgggaggctgaggcaggagaatcacttgaacccaggaggcggaggttgcagtgagccaagatcttgccattgcactccagcctgggtgacagagcaagactctgtctaaaaaaattaaaaaattaaaagtaaataaataaatatgaagttggcaactaaaaaaaatcaaacttggccaggcacagtggctcacgcctgtaatcccagcactttgggaggccgaggcaggcacatcacaaggtcaggagatcgagaccatcctggctaacatggtgaaacccggtctctactaaaaatacaaaaaattagccaggcgtggtggcgggcgcctgtagtctcagctactcaggagggtgaggcaggagaatgccctgaacccgggatgcagagcttgcagtgagctgagactgcaccactgcacttcagcctgggtgacagagcgagactctatctcaaaaaaaaaaaaaaaaatcaaactttactagataggagaactgctcacaaaacagaaaaaaaaccctacaaatcacattttaattataaaaatatgaccatttacatgaaaatgctctgtcttaccaataagaaagcttattagttaaaagaacagaaactgcttgtgtgtatatgcacatatgtatgcgggcatgtgtgtctgtacgtgtgtacatatgcagttgccttcctccaccaaaaggtaaactttttttttttgagacggagccttgctctgttgtccaggctggagtgcagtggcgcgaccttggctcactacagcctccgcctcccgggttcacaccattctcctgcctcagcctcccaagtacctgggactatagccgcccgtcaccacgcctggctatttttttgtatttttagtagagatggggtttcaccatgttagccaggatggtcttgatctcctgaccttgtgatctgcccgcctcggcctcccaaagtgctgggatgacaggcgtgagccactgcgcccagcaacttttttttttcttttttttttttgttgagacggagtctcgctctgtcaccctggctgtagtgcagtggcgcgatctcggctcactgcaacctccgccttccgggttcaagcaattctcctgcctcagcctccctagtagctgggattacaggcacccaccaccacccctggctaattttttgtattttcagtagagatggggtttccccatgttggccaggctgatctcgatctcctgacctcgtgatccgcccatttctgcctcccaaagtgctgagattacaggagagagccaccgcacctggcctaaacttttttttttaaattgggataaaattcgcatagcatgaaattcccgttaactatcttgaagagagcagctcaatggtattcaacacttacaccgtgctgtgaaatcatcagtccatctccttctagaacattctctgcaacccgaggagaccctgcacctattatcagtcatgcccatttcctctccccgcactaagtctcttgaagtttatgactttgtgtgtctttcctccacaatgaccattctccttaacttttaaaaagccattcgccctctcttttttccttttttttctgagacggagtctcgctcttttgccctggctagagtgcagtggtgtgatcttggctcgctgcaacctctgcctcccaggtttcaagcaattctcctgcctcagcctgccaagtagctgggactacaggcgcacacaaccacgcccagctaatgtttgtatttttagtagagacggggtttcaccatgttgaccaggatggtcttgatctcttgacctcatgatccaccctcctcagcctcccaaagtgctgggattacaggcatgagccaccacgccctgccccctcacttctttaataagaccctgatttcctttacaggatcctgccccaacccaggggatgaaccaggcaggtcgatctgttccccatttctggtagccaagcttcagacttggtaaagtgtgtgggagaagcatggcaaaagaggaacagggaaaaaactatctttgcccacaccctccctttctgctaggaatgccatcttgagaatgtgatgtccagagcttcagcagccactttgtgaatatgagaaaactctgccatgcccatgccctcatttcctgctagggatgctttattgagggtgtaatatctggagcttcagcagccactttgtgactatgagaaaactctgttgtgcccatggcctcccttccttctaggaatgctctcttgagggtgcgatgtccggagcttcaacagccactttgtgagtatgagaaaactctgttgtgcgcgtgcccttccttcctgctagcaatgctctcttgagggcatgatgtatggagcttcagtagccactttgtgattgtaagaaaactctcttgtgcccacggcctcctttcctgctaggaatgctctcttaagggcgtgatgtccggagcttcagcagccactttgtaagaatatgaaaactgtgttgtgcccatgccttcacttcctgctaggaatgctcttttgagggcaggacattcagagctccagcagctgctttgtgactatgaggcacactgtcagactgtgaggtgttaccatgcaggaggatgtcattacctgttctttatttgcattactgttcttttatctgcattacctgttcttttatttgcattacctgttctttatttgcattactgttcttttatttgcattacctgttctttatttgcattactctctgttctttgtttgcattactgttcttttatttgcattacctgttctttatttgcattactctctgttctttatttgcacgaacggcctagatttctctgcctgcatcactgcagcaaacactccacgggactttggcaggagcaagaaatattctcacttcacgtctcctcaattcctcccagccatttgtgccgctgtgatgataggtctgtggtaaggaatattccttctccccaggctgcagcagatacctggaacaggcattcctcgtagtacttctgtttgctacttttcatctctaggaatggagtggagaaatcacctgcccaggtgtagccatacagagtagttaatgaagttcattcatgagggcatatgtgtcgccaagccccttttaatatttccattcctccaacttcttctaaagaacagcatactggccaggtgcagtggctcacgcctgtaattccagcactttgggaggatgaggcaggtggatcacctgaggtcaggagtttgaaaccagcctggccaacatggtgaaatcctgtctgtactaaaaatacaaaaattagccaggtgtggtggcatgtacctgtagacccagctacttgggaggctgaggcaggagaatcgcttgaacctgggaggcagaggttgcagtgagccaacatcttgccactgcaccccagcctgggtgacacagaaagactccatctcaaaaatcaaaaaaaatggaaacaaataagagagaaagaaagaaagaaagaaggaaagaaagaaaagaaaagaaagaaaagaaagaaaaagaaagaaagaaagaaggaaggaaggaaggaaaagaaagaaagaaagaagaaagaaagaaaagaagaaagaaaaagaaagagaaagaaagaaagaaaagaaagaaaggaaggaaggaaggaaggaaggaagaaagaaagaaagaaagaaagaaagaaagaaagaaagaaagaaagaaagaaagaaagaaagagaaagaaagaaagaaaagaaaaaaaaacagcatacctcctgcattcatttgttccagcgccaggcacaatgaggtactgttcatatcctaagttatttctcttccggcaaagaagagatgccgacttatgttttattaggtagctcataaattaccttttcttaggcgactgcaactctgacatctcacgtgcattcttgtctagaccagcgcctcttttccttccaatttctgtaagggggtcttttttttgccaatcgtgcatcagccagctacccatttaagcagcttctcagaagccctttcaagttctgaagcgtctgctaataacacggtcttccgtcgaggctgtgtctccaatcattctttccaacgcaaccatcttccttctgctcacataacatatgtttgttatcatgtaacactcgcagcctgttggagcagcccgtcatctgcaacccagagctgctcaactgaacgctgtccaatgtcatttacgccggattttaaatgcatttttcctctagcactcttggctcttttaggatatttctctctctctctctctctctctctctctctctctctctctctctctctgtttttttcgccttgtacatgatttcctttgttttatgcatgttggaaactcagacctttttgcaagaattccatttaccaagatgcagacagcaatcataaaagatgatgctggctttcagaatggaaaaaaaaaattacaaaagaattcttcaacatttagccatgtcatgactgatttttttaaatgcaatcattttccatttgtctttaacgctagcatttttacaagtgggtttaaatatttgatagatttatattttaaaccttttaggccgggtgtggtggctcacgcctgtcatcccactactttgggaggctgaggcgggtgaatcacctgaggtcaggagttcgagaccagcctggccaacatggagaaaccacactgaaacaccacctggccaggcacaatggctcacgcctgtcatcacagcactctgggaggccgaagcaggtggatcacctgaggtcacgagttcaagaccatcctagacaacatggtgaaaccctgtctctactaaaaaaacaaaaattagccaggtgtggtggtgggcacctgtaatcccagctactcaggaagctgaggcaggaggatcacttgagcccgggaggcggaggttgcagtgagccaacatcttgacactccaccccaggctgggcaacagagaaagactccatctcaaaaaaaaaagaaagagagaaagaaagaagaaagaaaaagaaagaaagaaagaaagaaagaaagaaagaaagaaagaaagaaagaaagaaagaaagaaaggaaggaaggaaggaaggaaggaaggaaggaaggaaggaaggaaggggaagggaagggaaggaaggaaggaaggacggacggaaggaagggagagaaagaaagaaagaaagaaggaaagaaagaaagaaagaaagaaagaaagaaagaaaggaaggaaggaaggaaggaaggaaggaaggaaggaaggaaggaaggaaagaaagaaagaaagaaagaaagaaagaaagaaagaaagaaagaaagagaaagaaagaaggaaagaaagaaagaaaaagaaaaaaaaaccagcatatctcctgcattcatttgttccagtgccaggcacaatgaggtactgttccaatcctaagagccgagatcatgccactgcattccgcttgggtgacagagaaagactccatctcaaataaatgaatacacaaataaataaaataaactactctcctattgacgttgactagtctacgtctttctgggtagtgccttcactcctctctgacccttagtgaacacctttagcaatctgtaatcaatatatttgtaacgaatcaccatcagctgtccatggtcccagtcgtgactcccattgaatttaagggtgaagatgcccctgttttctgagggatctcttcctccttgtgccttctgtaccaaatcaaaatgtccaatctcaatgccggggctgggatcattgatgcttaccacgtgggtttccaacatagactgtgggttgcatttttctaaaatacatggtccaacagcgtttaaggtcaccgtcattgcccctaaacccacagagtgaggcatagaacacaggatcaaatgcacaaacccgtgcacacacacacgcatgcacttattttcctaactacatgagaaaaatcatttggtgcttatctaaaatgactctccggctgggtgcagtggctcatgcctgcgatcccagcactttgggaggccgaggcaggcggatcacctgaggtcaggagttcgagaccagcctggtcaacatggtgaaaaccccgtctctactaataatacaaaaattagctgggcatcgtgttgggcacctgtaatcccagctacttgggaggctgaggcaggaggatcacttgaacccaggaggtgcaggttacagtgagctgagatgctgagatcttttaagatatctttttggctgggtgcggtggctcacggctgtaatctcagcactgtgggaggccgaggcaggcggatcacctgaggtcaggagttcgagaccagcctggtcaacatggtgaaaaccccgtctctactaataatacaaaaattagctgggcatcgtgttgggcacctgtaatcccagctacttgggaggctgaggcaggaggatcacttgaacccaggaggtgcaggttacagtgagctgagatgctgagatcttttaagatatctttttggctgggtgcggtggctcacggctgtaatctcagcactgtgggaggccgaggcaggcggatcacctgaggtcaggagttcgagaccagcctggtcaacatggtgaaaaccccgtctctactaataatacaaaaattagctgggcatcgtgttgggcgcctgtaatcccagctacttgggaggctgaggcaggaggatcacttgaacccaggaggtgcaggttacagtgagctgagatgctcagatcttttaagatatctttttggctgggtgcggtggctcacggctgtaatctcagcactttgggaggctgaggcaggtggatcacctgagatcaggagttcaagaccagcctggtcaacacggtgaaacccccatctctactaataatacaaaaattagccaggcgtggtggcgggtgcctgtaatcccagctactagggaggctgaggcaggagaatcgcttgaacccgggaggcggaggttgcagtgagctgagatcgtgccactgcaatccagcctgggagacacagcgagatgctatctcaaaaaaaaaaaaggaaaagaaaaacaaaggaaggtgtggttatgagagagcagcctaaacatttgggggaacatcctaaatcccagcagcaggggaagaaaggccaggtgagagggtttttttctgcacagaagtaactgatgtctgactccatttctatgaaacgtgcccaacaggcaaatccacagagacaggaagtgaatttgtgactctcagaggttggagggggggatgtggagttactgcttgatgggaatgggggtttccttttaaagggaatgaagattttctcaaactacatagaggtggttgtagagcacgatgaatgtaccaaatgccccgttcgtataatttaaaataactaacttgatgtaattttttgtttttttgttttttttttttttgagacagaatcttgctctgtcacccaggctggagtgcaatggtgcgatcttggctcactacaagctctgcctcccggattcaagcg

SEQ ID NO: 2728 - DNA, 1100 bp, Homo sapiens
  misc_feature (1)..(1100): DMRX:1235401
gcgcctctgccccgccgccccatctgggatgagaggagcgcctctgcccggccgagaccccgtctgggatgtgaggagcgtctctgcccggccgccccgtctgagaagtgaggagaccctctgcctggcaaccaccccatctgagaagtgaggagcctctccgcccggcagccaccccatctgggaagtgaggagcgtctccgcccggcagccaccccgtccgggagggaggtggggggtcagccccccgcccggccagccaccccgtccgggagggaggtgggggggtcagcccccgcccggccagtcgccccgtccgggagggaggtgggggggtcagccccctgcccggccagccgccccgtcggggagggaggtgggggggggtcagcccccgcccggccagtcgccccgtccgggagggaggtgggggggtcagcccccgcccggccagtcgccccgtccgggagggaggtgggggggtcagccccccgcccggccagccgccccgtccgggagggaggtgggggggggtcagcccccgcccggccagccgccccgtcggggagggaggtgggggggacagccccctgcccggccagccgccccgtcggggagggaggtgggggggacagccccctccccggccagccgccccgtccgggagggaggtgggggggtcagccccccgcccggccagccgccccgtccgggaggtgaggggcgcctctgcccggccgcccctactgggaagtgaggagcccctctgcccggccagccgccccgtccgggagggaggtggggggggtcagtcccccgcccggccagccgccccgtccgggaagtgaggggcgcctctgcccggccgcccctactgggaagtgaggagcccctctgcccggccagccgccctgtccgggagggaggtggggggggtcagtcccccgcccggccagccgccccgtccgggaagtgaggggcgcctctgcccggccgcccctactgggaagtgaggcgcccctctgcccggccagccgccccgtccgggaggtgaggggcgcctctgcccggccgcccctactgggaagtgagcccctctg

SEQ ID NO: 2729 - DNA, 1300 bp, Homo sapiens
  misc_feature (1)..(1300): DMRX:1717801
gggagaaagagaataaatcaagcccctaatgtgtttcatattcagagaagcattcaaaggttgatgagaaataaatgtttatttaaaagatgatttttctttttcttttttttttttttgagatggaatatcgctctgtcaccaggctggagtgcagtggcatgatctgggctcactgcaacctccgcctcccgggttcacgccattctcctgcctcagcctcccgagtagctgggactacaggcgcccgccatcacgcctggctaattttttgtatttttagtagagacggggtttcaccgtgttagccaggatggtctcaatctcctgacctcatgatctgccagcctcggcctcccaaactgctgggattatgggcgtgagccaccgcacccagccaaaagatgatttttctttaactgttctctgtctagttgttaaatcaattgtgcatattgtttctgaatttctccttaaataattttcaacataagcagaacttggaaagatcatgatgaatgtcaatggtgtatattttgagcctctagcattcatcaattctgagaccttttctacattgattgattgattgattgattgatacacaggaggtcaaactatacaaataaatggtcattattagtccttaaaatatatcttagccgggtgcggtggctcacacctgtaatcccagcactttgggaggctgaggcgggtggatcaaaaggtcaggagatcgacaccatcctggctaacacggtgaaaccctgtctctactaaaaatacacaaaattagctaggtgtggttgcggatgcctgtagtcccagctactcaggaggatgaggcaaaagaatggcttgaacctggaaggcggagcttgcagtgagccaagattgtgccactgtactccagcctgggcaacacagcaaggctgtctcaaaaaaaaaatatatatatatatgtatatatatatatatcttgtattcttactgatgtggccatgagcaggttgaatagttactgcatggttttccttttaatgtgggattttctgttcatggccataagctgaacatcttgtctaggttgtggttaaggctaaggaacatataactcaagagcaggcattttccttagccgagggtgtgagttccagtctgagtctgaaggcctgagacccaggagagctgagggtgtcagctccagtctgagtctgaagacttgagacccaggagagctgagggtgtgagttctagtgtgagtctgaaggcctgagacccaggagagctgagggtgtga

SEQ ID NO: 2730 - DNA, 2100 bp, Homo sapiens
  misc_feature (1)..(2100): DMRX:3862001
tagctcttatgactacagtgtttttctctctgcttaaagcgcagcaggggctgggcgcagtggctcacacctgtaatcccagcactttgggaggccaaggcaagtggatcagttgagatcaggagttcaagaccagcctggacaacatggtgaaaccccatgtctactaaaaatacaaaaattagccgggcatggtagcgggtgcctgtgatcccagctactggggaggctgaggtgggagaatcacttgaactcgggaggccgaggttgcagtgaaccgagattgcaccactgcactccagcctgggcgacagagcgagactctatgcaaaaaaccccaaaaaatccaatgtagctaaaagcagtttgatggtaacagtgacactgaaatgagaattgtgtcagaaaaaccacaaacaataatgaaatggctcctatataacccatccccaaaaacccacgtaaagaagaaaacagggctgggtgtagtggttcatgcctataattccagcactttgggaggcccagaagggaggattgcttgagcctgggaaatcgaggccacagtgagctgtatttgcaccactgtacttcagcctgagagtcagagtgaaaccttgtctcaaaaacagaaagacgaaaagggtacctgaggtattaactctgatcatcagtgagtggaaagattctggtattctggtgctttccattttcttttagcttatcttcatttttgagttttctggaagagcatttattgctttttttctttttgagacggagtctccctctgtcgcccaggctggagtgcagtggtatgatcttggctcactgcaacctccacttcctgggttcaagcgattttcctgcctcagcctcctgagtagctgggactacaggtacatgccaccacgcccggctaattttttgtattttttttagtagagacagggtttcaccttgttagccaggaggatggtcttgatctcctgaccttgtgatccacctgccttggcctcccaaagtgctgcgattacaggcgtgagccaccgcgcccggtcgcatttattgctttaagaaaaaaaaatttcacttgatgggaagaagctaaaatgaggctgactaggaaaatatcattactaaaaacattctccttcattcatggactttttttttgagacagtctcgttctgtcgcatatgctggagtgcagtggtacaatctcagctcactgcaaccttcgcctcccaggttcaaatgaattcttgtgtctcagcctcctgaataactggaattagaggcatgtaccaccatgcccggctaatttttgtattagggttttgtcatgttggccaggctggtcttgaacccctgacctcaagtgatacatctgcctcagcctcccagagtgctgggattacaagtgtaagccactgcgcctggcccttgttttggctaactctgagggaaactctttctgccatgggagattgtaccttaccattgtttatttccagggtctcctgagaacacagaccagaattactgaggtaatcttggcacattttcttaaccattttatgcgactttcaaattccttatatgtagctgggaaaaaaggctttgctagatgatctttttcaacctttgtgaagataaagattaagaaaaaagtttaaacctgaggcaaggaaaacacagaagaaaacctaaacaaagtttcggttctcagcccctgagcagccactcagtggtgggcgtttccttcactccccagtgagcacctactgtgtgttccgtatggcgcagggcagggaggagcaggccaagaaacaaacaagccttggggtcggggccacagagggcacggtgagctctcaggacacggcgggaagggaaggcagaaaggtcctgggcacaggctgggctgtcagctccagaggggcgcactgaccctgcatccatggtaagtgtggggcacaggcagtctgggctgcagcctcagagtggagcagagcccggggtgtaagaggccggctggggcaagtgggcaccaggagagcccaggctggccattatttgtggctgcatttccatttc

SEQ ID NO: 2731 - DNA, 3100 bp, Homo sapiens
  misc_feature (1)..(3100): DMRX:3865201
caaacaatgaacagtctgaaaaggaactaaagaaaatgaaaattccacttaaaatctagcaatcctacttctggatatataccccaaaaaattgaaaggagggcctcaaggaggtaattgaacacccgtgttcacagcagcattattcataatagctaaaaggtggaagcaacccaagtgtccattgacagatgaatgaatgagcaaaatgtggtatgcacagtgaaattttactccgccttaaaggacactgagacactttctacaacatgaaccttgagaatactgtgctaggtgaaataagccagtcacagaaagacaaatattctgtgattccacttctgtgaagaaagcagcgtagtcaaaatcatagagacagaaagtggaatagtggctgccagggttggggaaaaagggaatggagagttggtgtttatggggacagttttagtccccccactgccccgcttaccccaacttgaagctcagagttttagttgtacaagatgaaaagagttctggagatgtgtgggggtgatggccgtacaacatcgtgaatgtatttagtgcccctgaaccacacacctacatatggctaagatggtaaatgttatgctatgtatattttactacaataaaatatgttggaaaaaaaattttgatgtgataatgcaaacttacagcgactcacacctgctttatcgggagtttcagaaggggcaggagggagaggacacgctaagcagccagaggctattgacacaccggaagcatccccagggactgcctttctcaacatcaccctctgtaatggcagcgtcagccaagagtgcactgccattggttttactgaccaaacctaaagaaacggctgcgttcccatcagatttgctcactaaatcatgccgacacacagacatgcatcttccagcctgttcggcagcagtgcagacaacatgaggggtctcagatcttccacaagaatgattctggttctgcctgagccttcgcctgagtccccatcaggcattgtaaaggtcaacttaaggatgatgggcaggcagaggcaggaataaggactgatatggttgaatctctcattgctttagcaccatccgcttggtgctgctctcatgatagctggttgtttaaaagtgtgtggcacctgccgggcgcggtggctcacgcctgtcatcccagcactttggaaggttgaggtgggtggatcatgaggtcaggagatcgagaccatcctggctaacacgatgaaaccccgtctctactaaaaatagaaaaaattgccaggcgcggtggcgggcgcctgtagtcccagctactcgggaggctgaggcaggagaatggcgtgaaaccaggaggcggagcttgcagtgagccgagatcgcgccactgtactccagcctaggctacagagcgagactccgtctccaaaaaaaaaaaaggaaaaaaaaaagtgtgcagcacctaccccggccccttgtccctgctgtggccacgtgacatgcctgctcccactctgccttcaccgtgactgattctgaagcatccccagaagctgagcagatgccagcaccatgcttcccgtacagcctgtggaactgtgagccaactaaacctcttttctttataaaatacctggtctcaagtatttctttataacagtgtgagaatggccgaaaacgacacccagatgcaaacattacccaggccaccgcgtgctgactctctcaccaagcaggagcgggcccctccctcacgcggagccgctggcacggacagcctcgggaaggtcaggctgagcgtcctttcctctgtgcacccccggagggtgctcccattggctttctcagatagcaccatctcagggtccagctggccatggcctggattaagtttaaaatgctgggccagtccccacttccctatatatgactttttacaagtctgacacttgaagcttttgggcctcagggagcagcttgataagtcaaagagcgcctgcctctccctctgatcttcttccacactgacttctgaatcatcatcagaatctggcagatgaccgtcggccaaatcatccctttttatgaactcagctttagctgtatacttggcaggtcgagatacctgtctcaacgtgtcttcacttttaacgatggttttagtttctcagtatgttttgtatgcaagttggaaataaataaacgtcctgaactggatgaaacatgttacagtcggcgaactggaggccaacgaaggggtcaacatggtgccctgtccatttggagccttgggagctgggactttctttgcagggaccacctagagggctggcagtggtctctgtacaaacccctgagcaggaggctgatgtaggaaacatgactgtggctcggttctcacgaggggctgtaccctgagcagctgggggctggtgacgtggagtcccaccaggcgggaattcccccggggcggctggctctgtcttgcagattggggctagactgtggccagtagggacgttggccgttcctgaccttttgtttctccagacgttaccttgacacaaatggcttctagttgctttcctacagaaagacaagaaagggaaaagaagcattgtgcttatcaacatgtctgcaattctgctctcatagtaaatccactactgacattttttctaaattacgtcttacatatacaatttatgtaacgtgtttgtattaactgtttttcagacctttctgaccagaaaccacagtgatacaggccgggcgcagtggctcacacctgtaatcccagcacttcgggaggccaaggtgggcagatcacttgaggtcaggagttcaagaccagccaggccaacatggtgaaaccccttctctactaaggatacaaaaattagcagggtgtggtggtgcacacctgtaatcccagctactttggaggctgaggcatgagaatcgcttgaacctgggaggacgaggttgcagtgagccaagatcgcgccactgcactccagcctgggtgacagagcgagactccatctcaaaaaacaaacaaaatggccgggcacggtggc

SEQ ID NO: 2732 - DNA, 2300 bp, Homo sapiens
  misc_feature (1)..(2300): DMRX:3934001
cagcaaaagaaaatgtagggcaagcaaaatattaagcatttcatactcacttgtgtaggccacgggaactattatgaaaaggtggatgttgcatgtttcagtatattttttgttttgttttgtttttgagatggactctcgctgtgttgcccaggctggagtgcaatggcgaggtctcagctcactgcaacctccgcctcctgggttcaagcaattctcctgtctcagcctcccgagtagctgagattacaggtgcatgccgccatgcctggctaattttttgtacttcagtaaagatggggtttcactgttttgcccaggctagtcttgaacccctgagctcaggcaatccacctgcgttggcctcccaaagtgctgagattacaggtgtgagccaccacgcccgacctcagtacacttttaatatacacagagctttgccacattttggagggttacctactattgcaatttctggatttttatttcattttttatgtttgtgtctctccattttagtttaatgtaatgcaattcaatagattttctcattaaaataaaatctcagcctctctccattgcataggatgaagcaggcatgatgtagggcaagctcactggctggattcagacccttgaaggaggccgggcgcggtggctcatgcctgtaatcccagcactttgggaggctgaggtgggcagatcacttgaggtcaggcatttgagaccagcctggccaacatggtgaaactctgtctctaccaaaaaacccccaaaaatgaaaatacaaaaattaactgagtgtggtggtgcgtgcctgtagtcccagctacttgggaggttgaggtgggagaatcccttgaacctgggaggtggaggttacagtgagccgggatcatgccactgcactccagactgtgtgacagagaccctgtctcaaaaaaaaaacaacacaaaacccaaaacagacccttgagaagtgagcattttgcagtattccatttgggagctggctattctgcttcctcctaacatcccaaaggacacaggatggcctgagctcccaggtaccctgggtttcccagtaagaattccaggagtgttgagagaaatgcaaattgtctctgcagagcagcagaccccagagcttaaaggcttctctccgttcacagattgctgcatggagatgagaggaaatagagggtgaacagatctcctgctactgcacatgctacttttgatttcccagctggtgtttgaaggctgtgcaaggtgttggtttgcaggatgatggagacccagatcattgtgaatccatgaccgtgtggccgtttgcatcgactcagccttactgcagatactaaccttcattcccctctccagctatgcactggttttctgcataccacttggaatttatgttggctctgagtcatctgactctcacatgagaaagaaccaaataatgacctgttattttaaaagaaagtatctgcatatggcttcttgtctgccgaatgttgcacattaggccttttttattgagtttcaaataaacccctgaattaattctgcaggcaaaggcattgatgttagcaccatttgatcgcttgaatgcacgtcataacagcattttaacgtgcttacagcaagggggatgagaccatatcgaggatgcactttgtcgttattaaggttaaaaacaccaagatagctgggtgcggtggctcaggcctgtaatcccagcactttgggaggccgaggttgaaggaagagaaagaccctctcatattattttatattgttttatactcagtacctgttttaagcaaaaacagcaaggaagtaaaaccaaagacaggcagctcggtgccaggcctgaaaccaggcctgggcctgcctggcctacacccagtagttaaaaatcaactcatgacttagaaaccggtgttattcatagattccagacattgtatagaagaacactgtgaaactccctgccctgttctgtttctctctgaccaccggtgcatacagcccctgtcacgtaccccctgcttgctcaaatcaatcacgaccctttcatgtgaaatctttaatgttgtgaacccttaaaagggacagaaattgtgcactcggggagctcggattttaaggcagtagcttgccgatgctcccagctgaataaagcccttccttctacaactcggggtctgagaggttttgtctgcggctcatcctgctacaaggtgggtggatcacttgagtccaggagtttgagactagcctggccaacatgg

SEQ ID NO: 2733 - DNA, 300 bp, Homo sapiens
  misc_feature (1)..(300): DMRX:5870001
gtgtgaaacaaattaatacagaaaacttctcacagcaagcatgactaggagggctcaggaatcttatagtcatggcagaaggcgaaagggaagcaagcaccttcttctcatggtggcaagaaagagagagagtggagcgtgaagtgccacacacttttgaatcatcagatgtcataagaactcactcactgtcaggagagcagcaagggggaaatccacccccaatccagtcacctcccaccaggcccctcctccagttggacatgagattttggcagggacacaaatccacaactcatc

SEQ ID NO: 2734 - DNA, 1000 bp, Homo sapiens
  misc_feature (1)..(1000): DMRX:6338801
gtacaggaattggaagtgaggtacagaaacagtgagattggttacagctcagtgtttgcctgatttgaacgcagtttgaacattgagcagtctatgagtggttgaagtatggcagctgggattggccaacactcagctattgttacaggcgcatattattaagttaggttttcaattttgtctgactattaagctaagttacagttcatccacaaggactcaaatatagaagtacggagtccttctcaggccatatttagtttgctttaacagggtgaacacttaaaagtctactctcttagcagttttcaagcatacattattattaactgtgtgtttcttgaatttattacttcttcctaactgaaattttgtattctttgaccaacatctcctcagtgcctgatcacttacctgtggaatctaaaaaagtcaaactcttaaaagcagagagtagaatgatggtccttctatatttgcttctgtatttcctgtggaacaaacgatattctggttttcaggataaaccaattcctttcctatatccacatccttctccccttctttgttgtttctttccctactttcccacctctttccaatgccctctccattccttgccccagtcagtgtcatctttttgttgaaactttcttaacctgctccaggaatggctagaggcatcctcctttttgtccacatgctctgtccttgttctgtgaatggtgttcactgcattccatttcgtgctactcttagatctgtatcattctgggctgagggctccttgacgagggagactctacatcgcttacctttgtagcaatatggcggccgagcaggggtcagtgcgtgtcttctgtataggcagatggtaaacatttttggctttgtagaccataaggtttctgttacaactactcagctgtgctgttgtcgcaagcccagccatgatcaatatgtaaaagaatgggtttacagtagctatctttacaaacac

SEQ ID NO: 2735 - DNA, 3700 bp, Homo sapiens
  misc_feature (1)..(3700): DMRX:6585001
gcagaagctctttagtttaattagatcccatttgtcaattttggcttttgttgccattgcttttggtgttttggacatgaagtccttgcccacgcctatgtcctgaatggtaatgcctaggttttcttctagggtttttatggttttaggtctaacgtttaaatctttaatccatcttgaattgatttttgtataaggtgtaaggaagggatccagtttcagctttctacatatggctagccagttttcccagcaccatttattaaatagggaatcctttccccattgcttgtttttctcaggtttgtcaaagatcagatagttgtagatatgcggcattatttctgagggctctgttctgttccattgatctatatctctgttttggtaccagtaccatgctgttttggttactgtagccttgtagtatagtttgaagtcaggtagtgtgatgcctccagctttgttcttttggcttaggattgacttggcaatgcgggctcttttttggttccatatgaactttaaagtagttttttccaattctgtgaagaaagtcattggtagcttgatggggatggcattgaatctgtaaattaccttgggcagtatggccattttcacgatattgattcttcctacccatgagcatggaatgttcttccatttgtttgtgtcctcttttatttccttgagcagtggtttgtagttctccttgaagaggtccttcacatcccttgtaagttggattcctaggtattttattctctttgaagcaattgtgaatgggaattcactcatgatttggctctctgtttgtctgttgttggtgtataagaatgcttgtgatttttgtacattgattttgtttcctgagactttgctgaagttgcttatcagcttaaggagattttgggctgagacgatggggttttctagataaacaatcatgtcatctgcaaacagggacaatttgacttcctcttttcctaattgaataccctttatttccttctcctgcctgattgccctggccagaacttccaacactatgttgaataggagtggtgagagagggcatccctgtcttgtgccagttttcaaagggaatgcttccagtttttgcccattcagtatgatattggctgtgggtttgtcatagatagctcttattattttgaaatacgtcccatcaatacctaatttattgagagtttttagcatgaagggttgttgaattttgtcaaaggctttttctgcatctattgagataatcatgtggtttttgtctttggctctgtttatatgctggattacatttattgatttgcgtatattgaaccagccttgcatcccagggatgaagtccacttgatcatggtggataagctttttgatgtgctgctggattcagtttgccagtattttattgaggatttttgcatcaatgttcgtcaaggatattggtctaaaattctcttttttggttgtgtctctgcccggctttggtatcagaatgatgctggcctcataaaatgagttagggaggattccctctttttctattgattggaatagtttcagaaggaatggtaccagttcctccttgtacctctggtagaattcggctgtgaatccatctggtcctggactctttttggttggtaaactattgattattgccacaatttcagagcctgttattggtctattcagagattcaacttcttcctggtttagtcttgggagagtgtatgtgtcaaggaatgtatccatttcttctagattttctagtttatttgcgtagaggtgtttgtagtattctctgatggtagtttgtatttctgtgggatgggtggtgatatcccctttatcattttttattgtgtctatttgattcttctctctttttttctttattagtcttgctagcggtctatcaattttgttgatcctttcaaaaaaccagctcctggattcattgattttttgaagggttttttgtgtctctatttccttcagttctgctctgattttagttatttcttgccttctgctagcttttgaatgtgtttgctcttgcttttctagttcttttaattgtgatgttagggtgtcaattttggatctttcctgctttctcttgtaggcatttagtgctataaatttccctctacacactgctttgaatgcgtcccagagattctggtatgtggtgtctttgttctcgttggtttcaaagaacatctttatttctgccttcatttcgttatgtatccagtagtcattcaggagcaggttgttcagtttccatgtagttgagcggctttgagtgagattcttaatcctgagttctagtttgattgcactgtggtctgagagatagtttgttataatttctgttctcttacatttgctgaggagagctttacttccaactatgtggtcaattttggaataggtgtggtgtggtgctgaaaaaaatgtatattctgttgatttggggtggagagttctgtagatgtctattaggtccgcttggtgcagagctgagttcaattcctgggtatccttgtcgactttctgtctcgttgatctgtctaatgttgacagtggggtgttaaagtctcccattattaatgtgtgggagtctaagtctctttgtaggtcactcaggacttgctttatgaatctgggtgctcctgtattgggtgcataaatatttaggatagttagctcctcttgttgaattgatccctttaccattatgtaatggccttctttgtctcttttgatctttgttggtttaaagtctgttttatcagagactaggattgcaacccctgcctttttttgttttccattggcttggtagatcttcctccatccttttattttgagcctatgtgtgtctctgcacgtgagatgggtttcctgaatacagcacactgatggatcttgactttttatccaacttgccagtctgtgtcttttaattgcagaatttagtccatttatatttaaagttaatattgttatgtgtgaatttgatcctgtcattatgatgttagctggtgattttgctcgttagttgatgcagtttcttcctagtctcaatggtctttacattttggcatgattttgcagcggctggtaccggttgttcctttccatgtttagcgcttccttcaggagctcttttagggcaggcctggtggtgacaaaatctctcagcatttgcttgtctataaagtattttatttctccttcacttatgaagcttagtttggctggatatgagattctgggttgaaaattcttttctttaagaatgttgaatattggcccccactctcttctggcttgtagggtttctgccgagagatccgctgttagtctgatgggctttcctttgagggtaacccgacctttctctctggctgcccttaacattttttccttcatttcaactttggtgaatctgacaattatgtgtcttggagttgctcttctcgaggagtatctttgtggcgttctctgtatttcctgaatctgaacgttggcctgccttgctagattggggaagttctcctggataatatcctgcagagtgttttccaacttggttccattctccccatcactttcaggtacaccaatcagacgtagatttggtcttttcacatagtcccatatttct

SEQ ID NO: 2736 - DNA, 1200 bp, Homo sapiens
  misc_feature (1)..(1200): DMRX:9448201
gactggaactctcttgggcactggctgttcacaggaggaatttcttcttccttagggaagcctcagtcctgctatagaggcctttcacctgattatccaagataatctctcccccggcttaaagtcaactgattatggaccttatttacatctcaaaacagcctggaagcaacacctagattagtgtttgtagtgggttggattgtgtatccttaaaaagataagttcaagttctaacccctggtacctgtgaacggggctttattcggaaataaggtctttgctgatgtgatcaagttgaatgaaggctatactgaattaagggaggcggtaaatccattaactggataacctgtgtctttataagagaaagaagagggagatctggacacacacacacatacagggagggagaaggccatgtgaagatggtggcagatattggagtgatgcagctactaagcaaggaacaccaaggactgccagctgtcatcgggagctggaagagacagggaagcatcctcccctagagccttcagagggaacatggccctgccaacatcttgacttcagacttctggccttcagaaatctgacagaataaatttatgttgtcttaagccatctagtttgtggttccctgtttgagcggccctagagaatgaaaatggtatttgatggaataactgaggattgtggcctaggcaagcggacacatcaaaagaccaccacctctccattcccttctcttctcctttcccttcctttccctcctttccccttcccttccatctcctccccttccatcccctccccttcctttcccttcccttccctccatctcaaccctcttcatgtccactgagctcatattctggctgggggaacagacaattaaaactaatgagcaagccaggcgcagtggctcatggctgtaatcccagcactttgggaggctgaggcaggaagatcacttgaggcctgaagttcgaaacaagcctgggcaacatggcaaaccccatctttaccaaaaaatacaaaaattagctggccatgttggtgctcgttagtaaacctagctactcaggaggctgagatgggaagatggcttgagcctgggaggccagggttgcagtgagccatggtcaaaccactgcactccagcccaggagacagagccagaccctgtctcaagaaaca

SEQ ID NO: 2737 - DNA, 1100 bp, Homo sapiens
  misc_feature (1)..(1100): DMRX:11916701
tgctgccttatgttaatctggttctccctgtggtaggttgtgattccataaggaggggactgggcagtgtctataccatgaagaggggacgagaccatgtctgcactgtcatgtgcctttttgtggaccctcccacaccctctttcttgtcagcagagctcccctcccctcctactaaaatgccagatacctgtgttcctagcctccctcacacataaggcacgggcacatgattcgatcctgaccaatgtgaactggggaaatactggggctgaggctggggctgtacaaagattttcttccaggactgaaggagagagttgggaaacttcctacctcttcctgctcaaagacgctgttctgcaaaaaagtaggcaaagtcatgaacagacacttttcaaaagaagacataaaagtggccaatgaacatttgaaaaaatgctcagcatcactaatcatcagagaaatgaaaattaaaaccacaatgagataacatctcacatcagtcagaatggctattcttaaaaattcaaaaaataacagatattgatgaggatgcagaaaaaatggagtacttatacactgatggtgggaatgaaaattcattaaacccctatagaaaacaatatggagatttatcagagaactaaaaatagaacttccatgtgacccagcaattccactactgggtatcaacccaagggaaaataaatcattctatcaaaaagacacctgtgcttgtatgttcatcacagcactattcacaatatgaaaatcatggaatcaacctaggtgcccatcaatggtggactggacaaagaaaatgtggcacatagacaccatggaataccatacaaccataaaaagagggaaatcgtgttctttgcagcaacatggatacagctggaggctattatcctaagtgaattaacacagaaacaaaaatacgacaagttctcatttataagtgggagctaaacaatgggtacacatggacataaagatggaaacaatagacattgcagactccaaaaggagggaggaagggagggaggagggcaagggctgaaaaactacctattgggtactatattcactac

SEQ ID NO: 2738 - DNA, 400 bp, Homo sapiens
  misc_feature (1)..(400): DMRX:12538001
tggagagcgagtgccaaagcaggtcgaggcatcacctcacccaggaagcgcaaggggtcagggaattccctttcctagccaaaggaagctatggcagacagcacctggaaaatcaggtcactcccaccctaatactgcgcttttccaacggtcttagcaaacggcacaccacgagattatagctcgtgcctggctcagagggtcccatgcccacggagcttcactcattgctagcacagcagtctgagattgaactgaaaggcagcagcaggctgggggaggggcgcccgccattgctgaggctttagtaggtaaataaagcggccaggaagctcgaaatgggtggagcccaccacggctcaaggaggcctgcctgcctgtagactccacctctgggggc

SEQ ID NO: 2739 - DNA, 200 bp, Homo sapiens
  misc_feature (1)..(200): DMRX:19809601
aaacaaatgtatcttaaaatgtgcatgtttataaatcaaagtatatgaaaattacatgttaattgattcactattctttaaactgatatccaaccatcattaatattcatggaaaacgataattaataatgcatgtgccagcagaccataggtcaaccagcaagtgccagatcccagattgcagtacattatgcaacacc

SEQ ID NO: 2740 - DNA, 2500 bp, Homo sapiens
  misc_feature (1)..(2500): DMRX:20136101
caaaggtcagtcgtaaaacctttacatcattgcccagaaatgattaggctttcatagacatacatatgcaccccctcacccccaatctcattcattcctacaactgctacctttataaacacgtgtgcgtgcacacacacacacaccccccacacacacaccagacatatgcccttattgttttacattgttttatagttctgcttctcagaactgtagagatcatgcatcaggtagaccggaaagccttctgatgctcagatttggctagtttcatcattgatccacttcagtaaaagcagatctcagagaatgtaatgccatttctataatatactgtctctgctattagacatgtttaaattatcgactcattctgaataagtagattgactaccccacttttggctctcctttacctcagtacctttaggtgcaaatctcataatttttagttcatttagcaaacaaaaacaaacttcaaacaatgtctttgttgaattagaatatgactaatccccagagaggatgtccattaatttgtaaatatactgagacttcattttgaaaggctcaacagtggggatgacttgtggaagtcaattactcagactacagtgagtttagcacccatctaccacctcaacatggttggtcaactcaaaggcagcctttcttctgaagtgagggaaaaagtaataataaaacagtgtatgcccaagtcaagtcagctgctattttagaggcaaggatgaccaaggctaagaaaccaaaggacttttagccagaaaacgtatctcatgtttactggtttatatgtatggcgtaataaatccacccaaagttctattaaaagctaaagtactggaaataattggaatacctgaggaaatatggagtatatactagatattatatcaatgtcaaattacctgagtgtgataattctcttctagttatataagaaaatatacttgcacttagaagatacatgatcaagtaagggaaaagtaacatgatgtctctaaatttcaaatggtcctgaagaaatcctacatatggggctaggtgcggtggctcacgcctgtaatcccagcactttcggaggccgagacgggtggatcacgaggttaggagatcgagacccatcctggctaacacagtgaaaccccgtctctactaaaaatacaaaaaaaatacccaggcatggtggcgggtgcctgtagtcccagctacttgggaggctgaggcaggagaatggcgtgaacccgggaggtggagcttgtagtgagccgagatcgcgccactgcactccagcctgggcgacagagcgagactccatctcaaaaaaaaaattaaaaaatcccacatatatatttctttatatgtgtgtgtacagatgaaggatttaagggagtttgttgcactaatactgcaactttctgtaggtttgaaatgactcgaaataaaagtaacaggaaagggcaaacgatccagttaggatttatttgactagtgctatgtatcttggtctggcacttacaatattcttcagtctaataaaatcagttaactgttcagtttcattttattgtagtttacgaagttatatgctaatggcactggagaatggagaggtctataagggcctcaggctcatccttcaaatgtccatggtctactcaacatattatatgtaccattcactaccagaaatgctaatcatagaactgccaactaaatcacagaactgtcaaccatagctcaattccctctgaactatacgacacattcttagttcccagtactttgggaggtcatggtgggagaatcacttgagcccaggagttcgagaatagccagggcaacatatgaagacctcatctctatacagttttttttttttttttttttttttttttgagacagagtctccctctgtcacccaggctggagtgcagtggtgtgatctcggctcactgcaacctccgcctcccaggttcaaacaattctcctgcctcagcctcctgagtagctgggattacaggcacgtgccaccacacccagctaatttttgtaattttagtagagacggggtttcatcatgttggtcaggctggtctcgaactcctgacctcgtgatccgcccgccttggcctcccaaagtgctgggattacagacgtgagccactgcgcccagcctaaaaaaatttttaaaattagccagacgtggtggtgtgtgcctgtagtcccaaatactcgggaggctgaagtggaaggactgcttcagcccaggaggtcatggctgcagtgggctgtaatcgtgccaccacacttcaccctgggcgatgggcaagacgctgtctcaaaaaaataaagtccccagctaaaaaagaaaggatgttattttaaaaagcgtaatttatgaaaacacttaccctgaccatcctctttgaataccagttctcttttttcagattcattctcattcttacccctg

SEQ ID NO: 2741 - DNA, 500 bp, Homo sapiens
  misc_feature (1)..(500): DMRX:20315601
aattaatattaaaaaatacgttataaaagtctgaaaagccagggtacataaaggataaaaacctgatattcaccactatcactttcatatgtcaactctgagatactttttttttttaaaaaaattgagatataactcaaatgccatcaaattaaccatttcagagtatacaattccgtgggttttagtatattcacaaggttatggaaccatcgccattaattccagaatatttacatcacctcaaaaagaaacctcatacccattagcagtcactcctcattctccctcccctggcaaccacgaatctactttatgtcccatgggtttttccagaaatactttcctatgtgtatatttataaacacacacacacgtttctctcccccttcccacatgcaagttgaattgtcacatactgcttaataagctgtgttgactctgatatcaggaatatatcagatccatttgtgaaaaattagtctgggtgtcagggccaa

SEQ ID NO: 2742 - DNA, 1100 bp, Homo sapiens
  misc_feature (1)..(1100): DMRX:21816401
tacatcccctcgccctcccaccccacaccacccgccagccaatcactttcaaatccttaatcggccttcttgtccgccctttactggggaccagaaatggcttctgcctttaatgagattttcttcgtcaaatttcagagacaaaacgttattgttcatattttcatgcagagcagctaatcaggtgtgactgatccagtctcccagcccttaagccagtatcgcataaattgacacacactaaaaacaaaaattagcatgtaacatatggatctctttactcagaaatgcatcgattaagaattactcttctggttataaacaaataacttggaacactgtatcttacaagggcagatcctaccactctgtcctggaggagatgcctttgtcccttggcattgaatcagccataagagctgatcattattcaggctgcatcctttgaattgttgcaaacattatcagcccagttctgtcttttttattatagccacaggacacagtctctcttcaagctgctagggtcacctgtaggctgtcctgcaatgtagtgtgtgcatgacaaaattctaacaaaggggagattttgtgtaataaacagcagagagcagaaaggactttgaaaaatgcaaaggctgtgcacatatttcattcccataagtctcaaggatatgtcaatacattagacttctcaaaataaattcctttaagcagatcctgaaaccaaactgtattctcggttgtttgttctcactcgtgtatacattcattaaataaaaacaaaacgagtacttcttatatgccagacactatattaggtgctgggaacaggagggtaaaatagagtcacagtcccaacctcaggatagtcttaatctagcaggagaaacagtcaatgaaataagaaaaaacaatgcttgtgataaaggctctgatattataaaatcaagtgctagagctttggcaatgcagacaaggaacaactaattcattcctactagagataatattcatactgctgaccaggagaggtagacaccccagggtgagtgggagtgggaacagaggggtgggaaagatgagaaaagaatgggtca

SEQ ID NO: 2743 - DNA, 1600 bp, Homo sapiens
  misc_feature (1)..(1600): DMRX:21958601
tcacccttattcctccccgcattcttcccagcctctggcaaccactaatctgctttacatctctatgagtttgccttttctgttttgttttttgaggtaaagttttgctcttgttgcccaggctggagtgcaattgcgccatctcggctcaccgcaacctccgcctctcgggttcaagcgattttcctgcctcagcctcccaagtagctgggattacaagcatgtgccatcacacacggctaaggatttgccttttctggacataacaaatagaatcacttatttcacttagcatagtgtttttaaggtcctaccgtgttgtatggagcgtgtatcagtacttcgttccttttatgcctgaatagtgcgtggataaccacagtttgcttctccatctataacctgatggaagtttgggtcgtttctactttctggctattgcatatcatgctactgtgaacatctgtgtcagcttgggttgtgtgtcatgagcttcatttcatcatcatgcagctgttgtaaaaaggactagacatagggctataaagccaagctgttaagtaaggcatgccaaaggaccacctgcttgacctagaaattcattaagcttctaatatctgagaagtctaataggcagatccttttttaaaattaagttaaacttttaattgtaaactagaattttcatttgtgaaattgaagtcttttttgcatatcacttgatttctgtaatctggacctgctgcctgtcagtcttcgtgcttttgatggacttagcacattctgagttcagaagatgctctcagacccttaggcagtgctcagccatgggcttgggtgaaaaggagacttgagggatgccgcgctctttgtcattcttttcagaggggttatgccagtggtgttggtgacttctgaacagatacttctttaacttggtataatttatgtaaattttagtgtaccagttctgagttttgaccaatgcatacagttgtgtaaccaccactagtatcaagattagaaacatctgaacgtggttttaaagcagctacctgatttcaaattggattggaatccagtttcctttcctcttttaggtttaggggtctatcaagaaaaatcagaaagctgctttatgtgtgaagggacattgtgcacaacctgagcctggctgtcaggttatctgacgttaggatctggggtttaggggaaaggatgcctgcgtttgtgcttccccttgcgggggagttgcagactggctctattgccagccagctcgcacaccatcttcccgtggagagagtgcagatccctgaaaggagcaggcaagaaggggccgggtataagcctgaccaaaggtgggcccttggacttaggtggcaagtggtaagcatgggcggggaaggcgtgagtgactgtctgtgtgtacatccgtgtgtgtgtgtgtaggggcactgagaataaagtgtgagtgagggcttggagctctggaaatctcggcagttctttggtggctggggctgcagttgctggagcagtaggtgggctggaggttcggctttgggtcttatcacttggcatgatgcgatgatgggga

SEQ ID NO: 2744 - DNA, 200 bp, Homo sapiens
  misc_feature (1)..(200): DMRX:21968701
cttggtatttccttaaatcttggtttgtattatatctggactggcttagtatgtaaaactactaattaagattcttagtaatttgcactattaatttagaaatgtaatagggtgcagtatgtactgctcaggtgatgagtgcaccaaaatctcacgaatcagcactaaagaatttactcatgtaaccaaacaacacccgt

SEQ ID NO: 2745 - DNA, 300 bp, Homo sapiens
  misc_feature (1)..(300): DMRX:22664601
agactccatctccaaaaaaaaaaaaagaagggcagggcagggcagggcagggcagggcaggagggaggaagaaagaaaggaaagaaaggaaagaaaggaaagaaagaaagaaagaaagaaagaaagaaagaaagaaagaaagaaaggaaggaagcaagcaagcaagcaagcaagcaagcaaatgagaaaaaaaacatttctgtgaataaatgaccttcctggaaaatggaggcagacatggttgtgttttttcatccaagtgtttttgaacattgaaaagaaaacaaaatcctagctttg

SEQ ID NO: 2746 - DNA, 1500 bp, Homo sapiens
  misc_feature (1)..(1500): DMRX:26317501
aattgtgatgttagggtgtcaattttggatctttcctgctttctcttgtgggcatttagtgctataaatttccctctacacactgctttgaatgcgtcccagagattctggtatgtggtgtctttgttctcgttggtttcaaagaacatctttatttctgccttcatttcgttatgtacccagtagtcattcaggagcaggttgttcagtttccatgtagttgagcggctttgagtgagattcttaatcctgagttctagtttgattgcactgtggtctgagagatagtttgttataatttctgttcttttacatttgctgaggagagctttacttccaactatgtggtcaattttggaataggtgtggtgtggtgctgaaaaaaatgtatattctgttgatttggggtggagagttctgtagatgtctattaggtctgcttggtgcagagctgagttcaattcctgggtatccttgttaactttctgtctcgttgatctgtctaatgttgacagtggggtgttaaagtctcccattattaatgtgtgggagtctaagtctctttgtaggtcactcaggacttgccttatgaatctgggtgctcctgtattgggtgcataaatatttaggatagttagctcctcttgttgaattgatccctttaccattatgtaatggccttctttgtctcttttgatctttgttggtttaaagtctgttttatcagagactaggattgcaacccctgcctttttttgttttccatttgcttggtagatcttcctccatccttttattttgagcctatgtgtgtctctgcacgtgagatgggtttcctgaatacagcacactgttgggtcttgactctttatccaacttgccagtctgtgtcttttaattgcagaatttagtccatttatatttaaagttaatattgttatgtgtgaatttgatcctgtcattatgatgttagctggtgattttgctcattagttgatgcagtttcttcctagtctcaatggtctttacattttggcatgattttgcagcgtctggtaccggttgttcctttccatgtttagcgcttccttcacgagctcttttagggcaggcctggtggtgacaaaatctctcagcatttgcttgtctataaagtattttatttctccttcacttatgaagcttagtttggctggatatgaaattctgggttgaaaattcttttctttaagaatgttgaatattggcccccactctcttctggcttgtagggtttctgccgagagatccgctgttagtctgatgggctttcctttgagggtaacccgacctttctctctggctgcccttaacattttttccttcatttcaactttggtgaatctgacaattatgtgtcttggagttgctcttctcgaggagtatctttgtggcgttctctgtatttcctgaatctgaacgttggcctgccttgctagattggggaagttctcctggata

SEQ ID NO: 2747 - DNA, 1000 bp, Homo sapiens
  misc_feature (1)..(1000): DMRX:36753601
ttcttataatggatgctcccaccacccatgcacttcctcctgattcttcctaaggctggctgaaactacctggtccagctttagaatggatgcttcctacacttatacacttcctgcaggttatttgcattaggatggaaatccctccagccctgcctctgctgatatgtcctcccatatggtggcacaccctccactgatacatctcctgccaagttctcccttatgtgggatgctgactccgcgtatatacttcctgctggattgtccccagagggtgactgctttctgcatccatgcagctctcacagtcttctccccttagctgaatgctccctccaatcatgtactgcatccaggtcttctaaaaggctgactgaatcccacatatatgcacctcctcctatgtcagccctaggatggctgcattctagaccttgcacttcctacaagatcttccacagtgactgcatactgcaaccctgcattcctcccatgtcttacattaggctggatgcaacatccttccatgcatcacctgcagagtccaccctggtcttcattctccttccagtgatgcatggcctgcaggatcctcccctaggctcactgcacaaatcaatcatgcctctcaagactctccttaaactgaatgctccttccactaaactctgaccacattctcccttaggatagctgaaacttaaagccatgcttctacagcacgttctttcatgagctgcttccattttcacccacacacctcctgtcatattctaccctattcaggatgctctctccacctatgtacgtcctacattgatgtatcttagcatgtatgaaccctccactcatgcatggccctcaggtcttcccctttgctagatgctcataccacacatggtcctgttgtgccctgacctaacccgtctacaacatccttattatcctcctttagccacagcttcccatgggctagatgcatacctcatccacccat

SEQ ID NO: 2748 - DNA, 100 bp, Homo sapiens
  misc_feature (1)..(100): DMRX:41662501
gaaatgtggccgggtgcggtggctcacagctgtaattccagcactttgggaggccgaggcaggtggatcacttgaggccaggagtttgagaccagcttgg

SEQ ID NO: 2749 - DNA, 2700 bp, Homo sapiens
  misc_feature (1)..(2700): DMRX:42536201
ttttagtagagatggggtttccccatgttgcccaggctggtctcgaactcctgagctcaggtgatctgtccaccttggcctcccaaagtgctaggattacaggcgtgagccaccacacccagcccccagaaacagttttgacactcaacactttgtgagtccattgcagtttgtcctatttccaggattctctgaggaatactccctaaaacaggcatggctagttatgttgcttattcagagcctttcttgagattcctgtggaatttgtgattaagccaacccatgaaactggcatctgataccaagagaaatgttccttttggctcagtaatagttctgcttcaatgcatgtgggctgagcctgccaatagtcatggaaatggtgcactgaggtttaaaaaagggacgtttgattgagaacaaaagtcacagagaacttttctgaaggtctttggtcagcacgagaattattctttaatggcacagggagaggggaatcttaagcagctctgaccttttatcaatcgtgaagaattggccatcattgtgtacatcattgaatttcaaagcatttaagctcttgcttatccagtactccccctagcagtctgcacgaagtgggttaactgggcactcacacactgttggtaggaggacaaatggctacagccttttagtaggcaatttaggaacgtgcatcaaaattcaaaatgcatggtatcagtcaaggtcctggcatgaaacagatggcactttcaaactgggtaattgagggcatgcgataaagggcttagggaagccaacaagggatggttggccagagcagcaaaccattactaccctaggtctgaggggtgagagtaaggagtggttagcagaacttggaactgtatggaagggtcagcttgccaggagctgtggcctttgacaaaatgatacagccaatctactccgatagcagggagggtattgagagaaacaaataacccagagtcactctcttcctttcttccaatctcttccctgtacctcccactagcaaaatccaaacagaagccagaggcaagggagcctatagttatagtccatatgggtcagtcttcttgggcaagaaagagggtgctaaagggtacgagtgggtctgcagtgacaggcagaaactatctggcatatgcatataccttttgattctgcaatcctatttttacaatccatcctgtagacatgttccttcaggctttcaaagatcatcagtatagaatgtatttgtaatagagaaaaactggaaagaacctaaatttccagtaataaaaaaaaaaaaggttaggctgagggtagtggctcatgcctgtaatcccagtgctttgggaggcccaggcaggaggatgccttgagcccaggagtctgagaccagtctgaaaaacatagtgaggccctgtctctaagaaaaataattttaaaaaattagccaggcatggtgacatttggctgtaggaggcaggaggactgcttgagcctagaaattcaaggctgcagtgagctaagatcctgcattccagtctgggtgacagagtgagacacagtctctaaataaataaataggaaaaaaggaaaaacattaaataaagacacatccatattatagaataccatgcagctattaggaagaataagatagactctctatgtgctaatatggaaatgtgtccaagatgcagagtcatgtcagaagatgcaaaaacagtaaacaaaaaagaaacacaaaacacaagtggcagatcagtatctagagtgtgatcctatttttgttagggaaacaacaacaaaaaaaatcataaacaatgacatgtgcatttaaatacttatactcaaacctgattggggatgagcaggtaaaaaggaacttttagtatttttcctagatgcatttttattgcttgaagtgcttatcagaacacatttgtatattacttgtgtaattagataaatctaagaaataagaaagtgcaactgtaaaacttggggtaggtaaaatggttaactcctgatgggcagaaatgaatcccctcctcaattcctttccttccttgtcgctctgcttctagtctgttttgtgggcattgatggcctttgatgttcagtctcagtcctgccacttgacaagacaatgcttggcaaacctagggaattaggcttcatgtttaattctccttcagcctgttgggcgtaggatgtgcttcctgagctgtttgctttcacttttcgatcttgctgtgttagttcctaaactcaaccatgttgtactaagacttaagcaaaatgtaggaaatgcacagtgacccatgcctgtagatcatgtgtagctggaatctttgaacttcctatctgagtctcacaccttctctattgcacattgtcctgttgcttcatctctgtcctactttctgattgctcaagtcctcccatttggtatccacaatgtttgagtatgctagcttgcccttgtaacttattattgttgtttcattctgtcatttttttttttggttgtacttctactagccttcccctttggctagatgaaggagccattgctatgccctgccttatctgacagccctgccgggcatggccccatttcttccctacactctgactctgacctaaaaagcccatgtctagagaagctcctgcctt

SEQ ID NO: 2750 - DNA, 700 bp, Homo sapiens
  misc_feature (1)..(700): DMRX:43786001
ggaaaaatgatgccgataaacctgctcagtgcagggttgccacaaaccttcaatttgtaaaaagtgcaattatctgtaaagtgcaataaagtgaagttcaataaaaagaggtgtgcctgtatatgcaatttcaaaagactgtgacagggcactggtgaaaatatcagggcagagtctgaaatgttataacaatatattactgcagtgtccaactccttctgctccatcatttacttgcaaaattgaggttgtttgaacaaaattattgtggaagactcagcggcaaatgttgtatagaaaacccaacaagaagatttcaaaataaggaagaaagaacagagaaaggacctccccaacatgtgtgcatacgtgtgtgtaagcagacaaaccaggaagccttttaaagggaacttgtctctttctcgtctcctgcacccctccccactgtgcacctgttagaatcaatgtcccaatctgccactggcttgaggggtgtttgaatgtccttcaggcatgctggggcaggaaaagatgttgagaaagtctgaagtatgtgaagaagaaatgtttaaagtctaagagctcaaggtttaaaaatacaagagaaccatcttaggaatcccctaatataagaaggcaagagagagagcagacaaataggacaagatctgatcaaagaacgtgtgcatactgatcatgt

SEQ ID NO: 2751 - DNA, 800 bp, Homo sapiens
  misc_feature (1)..(800): DMRX:47431801
agagcgagactccgtctcaaaaaaaaaaaaaaaaaaaaaaaaaaaagaaaagaaaagaaagaaagaaaaaagaatgaaaccacaatgaaaccgtatgttgcgaaaactaacctcaacatttagaacctaacaaggtcgatgcctgtaaacctcagtggcattgctctgggagatgaactggaccaattgttaagggaactccagtaatgtgccagtatcttttgactcttactctgcaggttacatttactaccatagcatgatataatgtaacactggcattgttgctaagattataatgtctatattgatggtcaaacatattggtaaattgagttaaagccttttcaagatataatactaatagaaaatgactgccttgtggaaaaactggttttggctaaccatcagctaatttctatgctaaacagtttttgtttgtttgtttgtttgtttgttttttaagacggagtctcgctctgtcgctcagcctggagtgcaacggcatgatcttggctcactgcaacctccacctcctgggttcaagcgattctcaaacctcaggctcccaagtagctgggattacaggcacatgccaccatgcccggctaattttgtgttttagtagaatttcaccatgttgaccagactggtctcaaactcctgatctcaggtaatctgcccgcctcggcctcccaaagtgctgagattacaggcgtgagccaccacgcccagcctgctaaatagttttgtacaagtttacataagatacaaatagagggagatcaaagaggaagaat

SEQ ID NO: 2752 - DNA, 1900 bp, Homo sapiens
  misc_feature (1)..(1900): DMRX:49330101
cgggcccgtcgttgccattgtaaagagttttatttccttttctgattttatggcattgcgcagacccacccgttacaatggtgacagtggacatccttgtcttatccctgatgagaaaccgaaaaatttcaacatttcgccatcctattcactctcctttttttgtagacggactttatcagagtgagtcattccattctgttccaaatttgctgagagtattcatttgaatatatgttgattttcatcaaacagtgcatctatttcgattaccacagcgttttttcccattcatgtgttaatatagtgaattcgattgataaatttgtacgtttttaggttcgattattaaaacttgagacagcgtctcactctgtcaccgaggctggagtgcggtggtgttatcagagctcgctgcagccttgacctcctgggctcaagcgctcctcccacctcagcctcctgagtagctgtgagtataggtacatgccaccatgcccagctaatttttcgatggtttttttgtttgttttttgtagtgatgagattttctgatgttgcttaggctggtctcgaagtcctgagctcaggtgatctggccagctcagcctcccaaaatactaggattacaggcgtgagccttggcctggtctggtttttcttatataggggtcttatctatataaagactaaagttaatctgtgcctttgtgcgggtgggctaagagcatgatgacttttatcattctattgatttaaagaaaactgtccttgacttaccagtgtgtaagtccatgaaagcataattctgttgaaagcatatattgttaatgggtgttgggaaccgtgcactttccgctgctgtgggagcatgtccttggaggtacctttcatctgttttctcaactccaaacatcttaggaccatgggttgtgactggtaggactatgtatcttgctgctttcaagacggagtatattttcacgtggtgtcactctggctgtcctgtttccctaatactgtcacttcaccctctgcgattctgatgctacaaatgatagatatcgttttagcattttcttacgggtcctagcgattctattcatttttctttcagtctctttctctgacttgttcacattgaacaatttccttttgggataggttgctatttctgttttcgcaggtggtttacctgtcttcccagccagtcacagtggtccttgtccccatggtgggtccggggcaagagagggccctgggttgggggtggggttcagttgaagatggggtgagttttgaggggagcactacttgagtcccagaggcataggaaacagcagagggaggtgggattcccttatcctcaatgaggatgggcatggagggtttggggcgtggcgctgggaacggcagccctccccagcccacagccgcgcatgctccctgggctcccgcctcagtgcgcatgttcactgggcgccttctgcccggccccttcgcccacgtgaagaacgccagggagctgtgaggcagtgctgtgtggttcctgccgtccggactctttttcctctactgagattcatctggtaggtgtgcaggccagtcatcccgggggctgaagtgtgagtgagggtggagagggcctcgggtgggtcaggcgggtcccgcttcctggtctgtggcctccgagggagaagggccacgaggtcgtcctccttcccttcacaggctgcgaggccaccagcggcttcgtggttgtgaaggggcctggacggggaggaaggtgggccgtggaggggaggcggtcaggggctcaggtgaagacggggtgagtgctgttggggggatggaagtcccgaggtgccgggaacccccgacgacacagggcagattccct

SEQ ID NO: 2753 - DNA, 300 bp, Homo sapiens
  misc_feature (1)..(300): DMRX:49882301
ccaacgcagacaggcctcagctaagagtatagtgtgtgtgtgttaaaaaaaaaaaaaaaaaaagaaaaaaaaaagctgtatgatatacttgagcaaatcaatgaacctctttgcgattgttttatcatctgtaaaatgcagataattcctaccttaaagggttattgttaaagataaaatgatataaaaatgtgtcaaagtataaagtaaaaggcttggaactttgtagggactcagtaaacgtttgttggatccaaacctgaaacttctttggaccaggcccagaatgcatcagaggtg

SEQ ID NO: 2754 - DNA, 200 bp, Homo sapiens
  misc_feature (1)..(200): DMRX:49912101
gtgtacaccttgaggaacttggcgtcctgggacatgtggctcagtatcttgctctcctcttggtagtgacatctgcagccagatgaagttcttcacgctactcatctggtggatgtatagctggtgtccaccaaggccatgcctgtcggctcactggccctcaggatccacaggaagctcttctggctgatgactgacac

SEQ ID NO: 2755 - DNA, 900 bp, Homo sapiens
  misc_feature (1)..(900): DMRX:51113101
ttgatttgcatatattgaaccagccttagaatgaaatgaagcaagaagggaagtttagagaaaaaagaataaaaagaaatgagcaaagcctccaagagatatgggactatgtgaaaagaccaaatctacgtctgattggtgtacctgaaagtcatggggagaatggaaccaagttggaaaacactctgcaggatattatccaggagaacttccccaatctagcaaggcaggccaacgttcagattcaggaaatacagagaacgccacaaagatactcctcgagaagagcaactccaagacacataattgtcagattcaccaaagtggaaatgaaggaaaaaatgttaagggcagccagagagaaaggtcgggctaccctcaaagggaagcccatcagactaacagtggatctctcggcagaaaccctacaagccagaagagagtgggggccaatattcaacattcttaaagaaaagaattttcaaccagaatttcatatccagccaaactaagcttcataagtgaaggagaaataaaatactttacagacaagcaaatgctgagagattttgtcaccaccaggtctgccctaaaagagctcctgaaggaagcactaaacgtggaaaggaacaactggtaccagccactgcaaaatcatgacaaattgtaaagaccattgaggctaggaaggaactgcatcaactaacgagcaaaataaccagctaacatcataatgacaggatcaaattcacacataacaatattaactttaaatgtaaatggactaaatgctccaattaaaagacacagactggcaaattggataaagagtcaagatctatcagtgtgctgtattcaggaaacccatctcacgtgcagagacacacagaggctcaaaat

SEQ ID NO: 2756 - DNA, 200 bp, Homo sapiens
  misc_feature (1)..(200): DMRX:53468201
gctccaccagggagttagatccttttcttcttttttacaaaaaaatcaaggtgaaattccatataagattaaccattgcaaaatgaacaatttagtagcaatttgtacatttacaatattgtgcaaccactacttctgtctagttacaaaacattttcatcaccccaaagaaaagccctatactcactaagcagttgctc

SEQ ID NO: 2757 - DNA, 800 bp, Homo sapiens
  misc_feature (1)..(800): DMRX:53756501
ttgtaaggagttgaggacattcctgtctgttgtcttctattttcaatgcagagaaggtgagatgacagtgagtgtgagggtgaggtagaggagtgggaaggctgaagagaatggggatttggcaaaactgctgtggagactcgggctagaatttcatattttctctgccttcaatgggagatgctcagaattatgtgtgtgagtacttcttttaatgtctcatgaaatcacaaatgaatttctggtcctggatgtttgttgagctggccacaagatcaactgccttggaattttattccaaggcaaatgtccacttagaaatgtctcctggccgggtgtggtggctcacgcctgtaatcctagcactttggaaggccaaggtgggcagatcatgtaaagtcaggagttggagaccagcctggccaacatagtgaaactccatctctactaaaactacaaaaattagccgggcatgctggcgcatgcttgtagtcccagctacttggaaggctgaggcaggagaatctcttgaacctgggaggcagaggttgcagtgacccaagatcacgccactgcactccagctttggcgacaaagcgagactctctctcaaaaaaaaaaaaaaaagaaagaaagaaaaaaacaaaacaaaacaaaacaacaaaacaaagaagtgtctctgtgcctccttttttttttccagaatatggaaacttgggaattctgctccccctccttcctgctacagctgtcaggaagctcagggcacactgagccccatactctctgaggcgcctgct

SEQ ID NO: 2758 - DNA, 900 bp, Homo sapiens
  misc_feature (1)..(900): DMRX:53830801
taaaccaggttcattaggatagccatcacctcaatcgtttatcatttctttgtgttgggaacattaaaaattctcttttctagcttttaaacatatacaataaattattgcaaactatattcaccctatagtgctatagaacactagaacttattcctcccatctagctataattttgtttctgttaactagcttttccctaccctaccttcctccctcccctttccagcttttaatgaccatgattctaccttctacttttataagctgaatttttttagctcccacatatgagtgagaatttctggcatttatctttctgtacctgacttatttcacttaacattatatcctatcctccaggttcatccaggttgccatgaatgacagaatttcattcattttcatagttgaatagtattccactgtgtatatgtaccacattttctttatccactcatctgctgatggacatttagggtgattacaaattttggctattgtgaacagtgctgcaataaacgtgaggttgcagagatctctttgatatattgatttactttcttttggataaatacccagcagtgggatttacggattatatggtagttctatttttagttttttgagaaacttccacactttttttccataatggctgcactactttacattcccaacaacaatgtataagagttcccttttctccacatccttatccacatttgttattttttgtctttttgtttttgttttctttttttttttgctttccacatattctaatttgtctttttgataatagccattttaactggggtgagatgaagtttcattgtggttttgatctgcatttctctgattagtgacgttgggcattttttcatataccttttggcc

SEQ ID NO: 2759 - DNA, 300 bp, Homo sapiens
  misc_feature (1)..(300): DMRX:53853001
agattggggaagttctcctggataatatcctgcagagtgttttgcaacttggttccattctccccgtgactttcaggtacaccaatcagatgtagatttggtcttttcacatagtcccatatttcttggaggctttgttcatttctttttattcttttttctctaaacttctcttctcacttcatttcattcatttgatcttccatcactgataccctttcttccagttgatggaatcggctactgaggcttgtgcatttgtcacgtagttcttgtgccgtggttttcagctccatcagg

SEQ ID NO: 2760 - DNA, 2700 bp, Homo sapiens
  misc_feature (1)..(2700): DMRX:54226501
aaaaaagaactaaatgtaagagattcactataaaactcctagaagaaaatataggaataggccgggcacggtggctcatgcctgtaatcccagcactttgggaggccaaagtgggcggatcacctgaggtcaggagtttgagaccagcctggccaacatggtgaaaccccgtctctactaaaaataaaaaattagtggggtgtggtgccacgcgcctgtgtcccagctactcaggaggctaaggcaggagaatcgcttgaacctgggaggcggacgttgcagtgagccgagatcgcgccactgcactccagcctgggcgacggagtgagactctatctcaaaacgaaacaaaacaaacaaacaaacaaaagaaattataggaataaatcttcatgaccttaagttaggcaatagattttttttcttttttctctttcttttcaattactatagagtcaatggtgagccaacggaattttagatatgacagtaaaagcacaagtaacaaaagaaaagaaacagattagattttaaaaccattaaaaactttttgtgcttcaaaagacactatcaagaaagtgaaaagacaatctaagaataggagatgattatttgcaaaatcatattcagtaaggctctagtccttactcacaactcaacaatttctctacattccctccaacacttgctactgtcttaaaaatttttttttctttttttcgcctcatatgtcctatgtccttgggaattgcctttttaaatttcagccattttaagtgggtgtaaagttttatctcattgtgcctttgatttacatttccttaataactaatattacagaacatcttttcatgtatttatcagtcattcatatatcttctttagaaaaatgcctatttgaatcttttgcccattttaaaattggatttttgaatcttttattgttgagttgttgaaccctcatgtcctgctgttatgactgtaaaatggtgcagctattttggaaaaaaagtctggtaattcctcaaaagattaaacatagagttcccatgtcatctagcaattccactcctacatatctatccaagagaaatgaaaacaaatgtccacataaaaatttgaacacaactgttcatagcagcattattcataatagcaaaaaaaagagaaaacaacacaaatgtgtaatcactgatgaatgaataaaatgtggcatatccatacaatggagtattatttggcaacaaaaagaaatgaagtaccaatatatgttacaacacagttaaactttgtaaatatatgctaagtgaaaaaagtcacaaaagaccacatgatgtatgattccatttacatgaactgtccagagtaggcaaatcttattttattttatttattttattttatttttttgagacaggtcttgcttgttgcccaggctggagtgtaatggcgtgaacacggatcactgcagcctcaacctcctaggctcaagcaatcctcctgtctcagccttctgagtagctgggactacaggcgtgcgccaccatgcctggctaattttatagagatggggtctcactttgttgcccaggctggtctccaactcctgggctcaagcaatcctcctgccttggcctcccaaaaaagagcaggcaaatctatagagacaaaaaatactttagtgattgatgaggctggaggatgggggaagtgggaataaatggcgggggctactactcatagaaaagggatttctttttgaggtgatgaaagtgttctaatggataaacatacattttaatattatacagcaataaaaaatgaagtactgatacatgttataaaatgtttgactcccaaaaacattataagtaaaagaagccagtcacgaaaccacatattattgtgtaactgtattgatacaaaatgtttcagcataggcaaatctatagaaacagaaagcagatttgtggttgcctagggcctgtggttgggggtttggggtagaggagctacaatgagggatgactatgaatatgtacatgtttctttgtggaatgttgaaaatattccaaaatcaaattgtggtaatagctgcacaagtctgtaaattgtataagttaaatgagtgaacattatgatatgtgaaatatctcaataaaactgtaattttttaaaaaaattaaaagtaaagaagcaaaagaaatacttactttccaactcatttataaggcagcttttccctgatatcaaaccagaaaaagatagtatcaaaattttcaaaatataaaacaaaaagatgaaaactgtaaaccaacatacttattgaacttaaattaataaagggcatatacgaaaacttacagttaacattataatttatggcaaaagacagaaggctttctccttggaagaacaaggcaaggatgtccaatataaagttttagctagtacaatagtaagaagaaataaaaggcataaagattaaaaagggagaaacaaaaaagtctatattcgcagatgacataattgctcactcaaaaaatcccaaagaatctataagaaaacttctagaacaaatatgtttagcaaaatcttcagatgtaaggtcgatacacaaaaattaatcatatttctctatcaatgtgtgattggaaaccctgtagaaataaaataaatccttaggtataaataaatcga

SEQ ID NO: 2761 - DNA, 200 bp, Homo sapiens
  misc_feature (1)..(200): DMRX:54781101
ttaaaaacttaaacgtaaaacccaaaactataaaaaccctggaagacaatctaggcaatagcattctggacataggaaagggcaaagatttcatgatgaagacgccaaaagcagttgcaacaaaagcaaaaagagacaagtgggatccaattaaactaaacagcttctacatagcaaagaaaaccatcaacagagtgaac

SEQ ID NO: 2762 - DNA, 1300 bp, Homo sapiens
  misc_feature (1)..(1300): DMRX:56768001
ggggcggcccgccatggcttcccctggcagtctccaggaactgccaggcatgggtcgccccacactcagcactccgaaacttttttatttcccggcaagatagaggctttctggccccactgtggccccagccaagggcatcgcggagctgcccacaaaagcgaccagagtaaacggccccgttctctggctgtcagtggccagtggcttcccttatgcgtatctcaaaatggctgccggggcagctgcaccctgtgggctgactggtcttcgggatgcctggctgatctgtctcggggcctctagagtagctgcttctccaaggggtcccaatggcaggtccgctttgttctagggctctacgcccgggtcggggaaaccctggcttaggcagagtccaccccgccccgcccatcctcactcttctcggtgcctggcagaaggcaagtgtccctgtccctgcagcctgttgtcatgtccagaatcaccttccgctggatggcactgtggctccgccaatggcggtcacgtcttttccttcccccaccttgcctttatctttctccatctgctgccgacagaataaaacaaacgccaaaaacaaaaaaagccaagaaacaacgaaagataccggccaaggagcacccacctcacctacagcagggctctccacctaggtggtcactttggggaagcctgcaacggtaggagggttctctgcctccctccttccctctggattcttctccgggcagggttcccagtgaaccagagaacgtcaagaaattccacccttagggctgtggctcggtgggggtaggtcgcactgggggcagtgtgagggggtacagggggagggatatgtgggtgtgtgggtctgcatgcgggccgctgcagattcctctaggaatctgcgcaggccgcctgagcaagagaccaggctgcatgcctgtgcgcaccacacttgtccctaggtagcactcttcctcttggggaagggatcaaagttggatggaaagcagccaggtccagcaggcatccgcaccttgttgagccatggagctgcagggagtcgggccggatgtttcttgggatgatgggactggacgggacggactcctgtctgaggccttcagctccctccctctctggagcccaggcactcgtctgtgcacagtggtgggaggagcatgccgggtgggtttcacaggtggctctcctggagagagagcctcttggcatgtctgacggagcacgcgtgctcagtggaacgtggtggttcaccacttagttgccaggc

SEQ ID NO: 2763 - DNA, 4800 bp, Homo sapiens
  misc_feature (1)..(4800): DMRX:66272401
caatggtatgctgtcttcaagagatccatctaacacgtgaggacactcataggctcaaaataaagggatggaggaaaatataccaagcaagtggaaaaaaaaaaaaaagagcatgtgttgcaatccttaattcagacaaaggagatttcaaaccaacaagaataaaaaaaaaaggcaaagaagggcattacataatggtaaagggtccaattcaataacaagaagtaactatcctaaatatatacgcactcaacacataagcatccagattcataaagaaagttcttagagaccttcaaagagacatagatccccacacaataatactgggaggtttcaacactccactgacagtgttagatcatgaggcaaaaaataaagatattcaggatctaaactcaacattggaccaaatggatctgatagacctttacagaaccctccatcccaagcaacagaatatacattcttctcatcaccacatggcacatactctaaaatcaaccacaaaattagacataaagcaattatcagcaaatataaaaaaaatcaaattcataccaaacacagtctcaaaccacaacacaataacaatagaagtcaacactatgaaagtttctcaaaaccatgaaattaaatggaaattaaacaacaggctcctgaatgattttggggtacataatgaaataaaggcagaaatcaagaagatcttttaaaataatgagataaaacataccacaatcactgagacacagctaaggcagtgttaagagggaaattcagagcattaaatatccacaccaaaagttagatctcaagaatgtaacttcaaaactgcacaagcaagaacaaatcaaccccaaagctagcagaagatgagaaacaataacaaaaaattagagctgaactgaacaaaatcaagacacgaaaagccatccaaaagatcaatgaatccaggagttgttttttgaaaaaattaataaaataggacactagctagaataataataaaacagagaagatccaaataaacacagaaatgataaagggaatgttactattgattgcactgaaataaaagcaacactcaaaaactactacaaaaacatctacgcacacaaactagaaaacctagaagagatggataaattcctggatacttacatcctctcaagactgagccaggaaaaaactgattccctgaacagattaatcttgagctccaaaattgaatcagtaatgaatagtctacccaccaaaaaaaaaaaaaaaaagcctgaaacctgacagattcacagccaaattctacaaaaacaatggtatcatttctacaaaaactatttctaaaaattgagaaggagggacacttcccaaactcattttatgagagcagtatcattttgataacaaaacctgactgagacaaaaaaaaaaaatttcaggccaatattcttgatgatcatcaatgcaaatattgtcaacaaaatacttgcaaatcaaattcagcatcacatcacaaagccaatccacatgatcaagtaggtttcatcccaggatgtaagattggttcaacataagcaaatcaataaatgtgattcatcacataaacagaactgaagacaaaaaccacatgattatgtcaatagatgctgaaaaggcttttgataaatctcaataccctttcatgttaaaagctctcaataaattaggtattgaaggaacatatctcaaagtaataaaagccatctttgacaaatgcgctgccagtattacagcaaataggcaaaagctggaaatattttcccttaaaaccagcataagatacggatgacctctctcaccacttctattcaacatagtggaagccgaagccagagcagtcgggcaagggaataaaataaagggcatccatattggaagagagaaagtcaaagtgtatctatttgcagatgacatgattctgtatctagaaaatctcatagtctctgcccaaaagctcctccagctgattaacaactttagcaaagttgcaggatacaaaattaatgtacaaaaattactagcattcctatacaccagcaacagccaaaccaagagccaaatcggaaaaaacaatcctattcacaattgccacaaaaagaatgaaatacctaggaatacagctaaccagggaggtgaaagtcctctacaatgagaattacaaaacactgatcaatgaaatcagagaagacacaaacaaatgaaaaaaaaaaatcccatgctcatgaataggaagagtaaataaataaatattattaaaatggtcatagttcccaaagcaatttacagatttaatgctgtttctatgaaactaccatagacattatttacataactagaaaaaaaactgttttgaaattcatatgaaaccaaaaaagagcctaaatagccaaggcagttctaagcaaaaagaacaaagctggaggcctcatgttacactacttcaaactatactacaaggctacagtaaccaaaacagcatggtactggtataaaaacaggaacagagatcaatataacggaatagtgagcccagaaataaggtcacacatctatgaccatctaatcttcaacaaagcttacaaaaacaagcaatggggaaacgactccctattcaataaatggtgctgtgatagctggctagccatatgcagaagactgaagctgaccccttccctataaaaaccttggatgacaacctcagcaatattattctggacataagaatgggcaaagatttcatgacaaagaaaccaaaacctgtcacaacaaaagcaaaaattggcaagtgggatataattaaactaaagagcacagcaaaagaaactatcaacagagtaaacagacagcctacagaaattatttgcaaattctgcacctgacaaaggtctaacatccagcatctatatgaacttaactttacaagagaaaacaccattaaaaagaaggtaaaagacttgtactggcacttttccaaagaggacatacatgtggccagcaagcatataaaaaattttagtatcactggtcattagaggtacttaaatcaaaccacaatgagatgccatctcacatcagtcagatggctactattaaaaagtcaaaaaacaacagatggtggtgaggtggtggagaaatgggaacacttatacactgtgggagtgtaaattagttcaaccatagtagaaaacagtatgtttacactcccaccaacagtgtatagtgaatcacctgatggtgattcttcaaaaagcttaaagcagaactaccataaaacccagaaattccattactggctatatacccagaggaataccaatcattctaccataaagacacatgcatgtgaaggtttactgcagcactatttataatagcaacaacctgcaatgaacataaatgcccatcaatgacagattggataaagaaaatgtggtacacatacaccatggaatactattcagccataaataagaacaagatcatgtcttctggggaacatggatggagctagaggctaccatttttagcaaactaaggcaggaacagaaaaccaaataccatgtgttctcacttataagtgggagctaaatgataagaacttatgaacacaaggaaacgacagacactggggtctatttgatgagggagggtgggagaaggaaaagcagaaaaggtaactattgggtactgggcttaatacttgggtgataaaataatatgtatgaaaaattctggtgacacgtgtttgcatatgtaacaaaccttcacaagtacccccccaagcctaaaataaaaagaaaaaaaaaactaaaaatttaggtacaatagcatccagcaatctcacttctgggtgtatacccaaaagaatataaattagtatattgaagagctacctgcacttccatgtttgttgcagcactgttaacaatagccaagatttgaaagcactctaaatgtccatcagcagatgaatgaaaaagaaaatgtggtaagtatacgcaatagagtactattcagccataaaagaatgagaccctgtcatttgcaacaatgtggatggaactggaggtcattatgttaagcaaaataagccagacacataaagacaaacttcacatgttctcattatttttaggatctacaaagcaaaacaattgaactcttggacatagagagtaggatgattaccagaggccaagaagggtagggagcagggagatagatacagttaacgggtaaaaaaaaaaaatagtttaaaatgcataaacctatttaatagccaaacaaggtgactatagtcaataataatataactgtacatttaaaaataactgaaagagcataaatatattgtttgtaatacaaaacatacattcttgaggagatggataccccatcctctacgatgtgattattacacattaaatgcatgcatcaaaaccactcatgtactccataaatatacacacttactatgtacccatgaaagctaaaaattaaaaattcccacaatgatatgttacctcaactattatagtagtcttctgcttaattttctcacattctctctagctccatccaatttattcttcacatagaaaagtaatattttgcaaataaattaggcttctattttggacaaaatgtcatagacttgtctctcctttaagatgaaaagacactggaaattgtgagagagacaacaataaaagtattcaaatgttaaaaagagaaaggcagactggctagggacacaga

SEQ ID NO: 2764 - DNA, 1500 bp, Homo sapiens
  misc_feature (1)..(1500): DMRX:68526701
caaaggccttttctgcatctgttgagataatcatgtggtttttgtcattggttctgtttatgtgatgaattacgtttattgatttgcatatgttgaaccaaccttgcatcccagggatgaagctgacttgatcatggtgggtaagctttttgatatgctgctggattcagtttgcaagtattttattgaggattttcacagtgatgttcatcaaggatattggcctgaaattttctttttttgttgtgtctttgccaggttttggtttcaggatgatgctggcctcacgaaatgagttagggaggaatccctcttcttctattgtttggaatagtttcagacggaatggtaccagctcctcttgtacctctggtagaatttagctgtgaatctggctggtcatgggctttttttgattggtaggctattaattactgcttcaatttcagaacttattattggtctattcagggattcgacgtcttcctggtttagtcttgggagggattatgtgtccaggaatttatcaatttcttctagatgttctggtttatttgcatagaggtatttatagtattctctgatggtagtttgtatttctgtgggatcagtgttgatcttcaatttatcagtttttattgtgtctatctgattcttctctcttttcttctttattagtctggctagcggtctattttgttaatctttccaaaaaaaacagttcctgtattcattgattttttgaagggtttttcttgtctctatctccttcagttctgctctgatcttagttatttcttatcttctgccagtttttgaatttgtttgctcttgcttctctagttcttttaattgtgatgttagggtgtcagttttagatctttcccgctttgtcctgtgggcatttagtgctataaatttccctctaaacactgctttagctctgttgcagagattctggtatgttccgtctttgttcttattggtttcaaaaaacttgtttatttctgccttaatttcgttgtttacctagtagtcattcaagagcaggtcgttcagtttctgtgtagctgtgcggttttgagtgagtttcttaatcctgagttctaatttgattgcactgtgatctgagagactatgatttccattcttttgcattctgttgttatgatttccattcttttgcctttgttgaggagtattttacttccaattatgtggtcaattttagaataagtgtgatgtggtgctgagaaaaatgtatattcagttgatttggggtagatatcttttaggtccatttggtccagagctgagttcaagtcctgaatatccttgttaattttctgtctcgtctatctgtctaatattgacagtggggtgttaaagtctcccactattattgtgtgggagtataagtctctttgtaggtctttaagaatttgttttatgaacctgggtgctcctgtattgggtgcatatatatttaggatagttagc

SEQ ID NO: 2765 - DNA, 1200 bp, Homo sapiens
  misc_feature (1)..(1200): DMRX:68721601
cgagaggtgctacagaccctgctctacttcttaagtgacattgcctctgccgaggaaaaccagatgacagcaggcaacctggcagtgtgcctggcgccctccatcttccacctcaatgtctctaagaaggatagcccctctcccaggtgaaatggtgcacggcatgtcagggccgggctgggtccagacaatttgggccccactggacttttggcttttgatggctggcactgctgtgtctcagcctcaccacaaggagtgagcctgactcctcaggggccctgggctggtgggatgctgtggagcagggccttccaaaaggcagcaggttgttttgtggccaggtttggcaaagtggcttcctggcagctagaaggcagcctgtctgccatcttgtcttgtgctcttgtgccatctctcctctcaccacctcctgctccatctaggatcaagagcaaacgcagcctcattggcaggccaggccctagggacctgagtgacaacatggcagccacccagggcctgtcgcacatgatcagtgactgcaagaaacttttccaggtgagtaaccccaggccatgacacctacttaccagacctgggggaaccatcaggcctgacctcggtgccccaagtcagggataggacccaatttgacacatacccctcaagcttatacccccaactcttcccccacaatgtttctcatctaccttgctgtggtagctgcacctctccactgcccttaacgtgaacctgacagaccccatggggtctcctgctctctggagctgcagcccattgtgtgtgtgccctctcaggtgccccaggacatggtgctgcagctgtgcagctcctacagcgcagctgagctcagccctcccggcccagccctggctgagctgcgtcaggcccaagctgcaggggtaagcctgagcctctacatggaagagaatatccaggacctgctgcgtgatgctgctgagcgcttcaagggctggatgagcgtgccagggccccagcacacggagctggcttgcaggaaggtgagtgccacaccacgggtggctgctatggggctgggagagcatggtgcaggcaagggtagtcagagaacccaaaggaaggagccggggaggagctgccgcctgagtctcgctgtgcctcggcctggtccttggagaatgtcagagagtcaag

SEQ ID NO: 2766 - DNA, 600 bp, Homo sapiens
  misc_feature (1)..(600): DMRX:69238401
tgcatgccccctccagtgcccagctccctctcctcggccaacgacgcagccctccttccgttcaacattcctgccagctggtgtgtgtgccctgtacgaggaggctgggttgccatggcagccgtggagagctggtgtggacgggggccaccctggcgcagggttcctaacctccctgggaagggaggctgtggccccgggcctaaggagtgctttagcaggtcacctcagaaggcctacccccaccccgccctggccctctgcccacaccgggtgtgctttaagagctctcacttcacaagaaagggatgagctagggaggaaaaatgcccaggcccttcagagctcaagcccaatatagcagaactaatttgaaatgtcacttagggcagtctctctcccagccagcgaaaagctggtttatttacatagtcggccatggcaggaggccaagaaccccaccatgccaaggcgtaggggatgggtggctgggagccccagttgtgtccccttggcctggaaacttgctgaaaaccaccatctggaaacccctgtgggcagaagggccccatgcatgccttccccgctccagccagcact

SEQ ID NO: 2767 - DNA, 200 bp, Homo sapiens
  misc_feature (1)..(200): DMRX:70885901
aaaagaaaaagaaagaaagaaagaaagaaagaaaaaataagaagtattggtgaggatgtagagaaattggaactcttgtacactgttggtaggatggtaaaatggtgcagctgctatggaacacagtatgaaggttcttcaaaaaattaaaaatacaactcgcatatgatacagcaattacacttctgggtatttatcca

SEQ ID NO: 2768 - DNA, 200 bp, Homo sapiens
  misc_feature (1)..(200): DMRX:70928701
gttccttcccagcttttcttcttccccaccattatcacctcccttaagcctttctcaggcccatcccccatccttatccctggccccaaggactagcccctcctggcccaacccccaccattataccctgctctttgcctcaccagtgagcagcaacacgaggcccaaagcaaagaaatctggatattctgcaaggacat

SEQ ID NO: 2769 - DNA, 2300 bp, Homo sapiens
  misc_feature (1)..(2300): DMRX:71300101
aaacccttaaaagaaggaccctttttggactagccagaattctaccctggaaaagtgttagggattccttccaatagttagatctaccctgcctgtactactctagggagtatgctggaggcagagggcaagggaggggtggtattaaacaagtcaattctgtgtggtatattgtttaatcagttctgtgtggtgcattcctgaagtctctaatgtgactgttgagggcctggggaaaccatggcaaagtggatccagttagagcccattaatcttgatcattccggttttttttttttttgtccatcttgtttcatttgcttgccccgcccccgagacggagtcttactctgtcgcccaggctggagtgtagtggcatgatctcggctcactgcaatctctgcctcccgggttcaagcttgtccaggttgatcttgaactcctgacctcgtgatctacccacctcggcctcccaaaatgctgggattacaggggtgagccaccgtgcccaacctcacttgcttcttatccttacactcccccagccccagagaaactgccacatacaccacaaaaaccaaacatcccccaatgaccttagccccattgctccattcactcccaggtgagaattcaggcaaacgtccacaaaggtcacaggcagcgtacatacggttctgttataccccatatattaccccttcatgtcctaaagaagacattttctcttagagattttcattttagtgtatctttaaaaaaaaatcttgtgttaacttgcctccatctttttcttgggtgaggacacccaggaatgacccttttgtgtctatgatgttgctgttcacagcttttcttgataggcctagtacaatcttgggaacagggttactgtatactgaaggtctgacagtagctcttagactcgcctatcttaggtagtcatgctgtgcattttttttttcattggtgtactgtgtttgatttgtctcatatatttggagtttttctgaaaaatggagcagtaatgcagcatcaacctattaaaatacattttaagccttttaattttctgtggtgtttttgaaggggaaaggagggaggggagttatcttaggagatgagcagtagactctataaaggtaatcctttatgacctttggattacagtattgatctagacaaacatggggaggaggtggggatgaggtgcatcaaatggctggaggggttggcaaggattagcgctattgatactacatggaagtaatgatggaggaaagctgcccctctgaaagaggaagaaaatgggcttaatcctcatcgagctgggggcgcggggggggtctcaaaattggtatttgtttcttagcagctgctgctgtgtccaaggcttggaattgctgtggtgaatctaaaactgtctcagtagtggtgagctgacctcacccaagttcaaagccctactctgcctgatccttttttcctgagcctcagagctaaaatgcccccgagctctttcctattggctggaaagacgaattgaagttcccttgcccatgttaggaggtgtacgcctcctgaactaaagatagaaacagctggcccttccaggcagctaaaagcctccagactaagaggtgttccccattcggcagccagactccttgaaataccctttcagtaatcattcaaccaacgcttccatgtctctactctgtcgtaacaaaggctgtgggcagcactttgaccctaataccaaccttcctggtgagtaaagaatcctgacctggccaggggctctgtgtgggtgttggggactggtcagctggggggcagtgtgtttgaggagcggggaaagaaactacctgccctagtttaattggtctgagtgatcttacagcctttgctggcttttttttttttcttcacattatatgggaagaaaccataaatagaaacccggggaagaggtgaaaaatgatacttggtatagttatcttcccttccttgataacttctactgatgtccacagattcctgttgccatcaccctggggtcccaatcttccatgatgcacttaaggtgaggagtaggtgaggggggttagcaagagcatttcccagaagagataatacccaggaagctaagctgatctgggtctcttgttatcagggttggtcctgctgccgaaagcgaactgtagatttctctgagttcttaaacatcaaggtaaattatttatgtacttggattctgcccccaatagaaggattctatccctaatcctatctcctta

SEQ ID NO: 2770 - DNA, 1200 bp, Homo sapiens
  misc_feature (1)..(1200): DMRX:71332901
atgtgaggatttatttctgggctctctagtctattccattggtccatatgtgtgtctttatgccagtatcacactcttttgattactgtagcttttgtagtaagttttcaaatctggaagtgtaagtcctccaacttttttttcttctttttaaagactgttttagataattgaagtcccttcagattctacatgatttttttttttttttgagactgagtctcactctgttgcccatgctggagtgcagtggtgtgatctcagctcactgcaactctgcctcccgtgttcaagcgattctcctgccacagcctcccaagtagctgggataacaggcacgggtcaccacgcctggctaaattttttttttttgtatttttattacagacagggtaatgttggtccggccatgttggtcaggctgatctcaaactcctgacctcgtgatccgcccgcctaggcctcccaaagtgctgggattgcaggcatgagccacagtgcctggccgattccacatgaatttgagggtgcgttttctatttctgccaaaaattgcattgggattttgatatggattgcattgaatctgtatatcattttgaagtgggtttttttttttttttgagactaagtcttgctctatcgcccaagttggagtgcaatggcacaatctcggctcactgcaacctccacctcctgggtttaagtgattctcctgcctcagcctcctgaatacctgggattacaggcattcaccatcatgcccggctaatttttgtatttttgtcaagatggggtttcgccatgttgtccaggctgttcttgaattcctgacctcaggtgatctgcctgcctcggcctcccaacgtgctgggattacaggcgtaagccactgcgcccagaccagaagagtatttttatcataacaatatgaggagtaattcatcatataatgtcttccaatccatgaagacaggatatctttccatttatttatgtcttctttaatttcactcagcaatgttttgtagttttcattgctagcgtatggaaattcaattaatttttgtgtgctgattttgtatactacagctttgctcaattcacttattagctataatcattttttttgtgtaacctttagggttttgtacatatataccatcatgtcatctgtaaaaagagacaatcttacttctc

SEQ ID NO: 2771 - DNA, 3100 bp, Homo sapiens
  misc_feature (1)..(3100): DMRX:71603201
ggcaggttatgtgattcctccactttgttctttttgctcaggataactttggctattctgggcctttcatgattccatataaattttaggatagttttttctagttctgtgaagaatgtcattggtattttgatagggattgtattgaatctttacatttctttaggcagtatggacattttaacaatattgagtcttccaatccatgaacatggaatctttccatttgttggtgtctcctttaaaataaccgattcttaactgctattcaaaatgtcacagttcctgtcttgtttaatttgtgctaaataatctgctgaaatttagcatataaaggaggtggtagagggagtatatttacatatgattgtgtctcttgaatttcagatgagagtccggagtgttgtcatgtgaagcctgccatccaggaacctccaatagttattagtgatgatgacaatgacgatgacaacggtaatgatttggaagttcccgacgacaacagtgatgattcagaagctcccgacgacaacagtgatgattcggaagctcctgacgacaacagtgatgattcggaagctcccgacgacaacagtgatgattcggaagctcccgacgacaatagtgatgattcggatgttcccgacgacaacagtgatgattcatccgacgacaacagtgatgattcatccgacgacaacagtgatgattcggatgttcccgacgacaagagtgatgattcggatgttcccgacgacagcagtgatgattcggatgttcccgacgacagcagtgatgattcggaagctcccgacgacagcagtgatgattcggaagctcccgacgacagcagtgatgattcggaagctcccgacgacagcagtgatgattcggaagctcccgacgacagcagtgatgattcggaagcttccgacgacagcagtgatgattcggaagcttccgacgacagcagtgatgattcggaagctcccgacgacaagagtgatgattcggatgttcccgaagacaagagtgatgattcggatgttcccgatgacaatagtgatgatttggaagttcctgtgccagcagaagatttgtgtaatgaaggccaaattgcttcagatgaagaagagctggttgaggctgctgctgctgtctcccagcatgattcatctgatgatgctggtgagcaggatcttggtgagaatctcagcaaaccaccaagtgatcctgaggctaaccctgaagtttcagagagaaagctgccaactgaggaagagcctgcacctgtggtggaacaatcagggaaaaggaagtcaaaaaccaaaactattgtggagccaccgaggaaaaggcagacaaagaccaaaaatatagtggagccaccaaggaaaaggcagacaaagaccaaaaatatagtggagccactgaggaagaggaaggcgaaaaccaaaaatgtatctgtgacacctggtaagccagtcatgccaagtatgcctgtcccactgaatgtgccttgcctgccaaatgtgcctgtgttatccagtctgcctgtcctccctttcaaccctgtgccatttcagcaacttccctgtggcccaaggaggcatccatcccagtgcaaggatggttctgggaacaggggaggaatgcccacatctttctcatgctcctgtatcttagtatttgctgttcactagcctagagtgctgtctccctgaaccttctgttctgaggatatcttatttttcttaggaaattatctcttcctctatgaagccgtgagtcagggtggctcctgtctcctgggttaccaaagttctagagcccatctctaccaaagcactagtcacattgttagaatacattcctgagtctgtccccttccctaccccgtcccggtagactgtgagcctcttcgtgggaggactcttcctcatcttttagtctctctcaggatttggcctggtgcttggcacatgatagaggttcaataaattttttagatatatgaatgacactgactattgatacataagcctttagctagagcagctggcaggatctgccttgccctgcacactgagtaaaggtgctgcctagaatatgagccactcattggagcaggtgtgtgagctgttccatagcaccccttcgactgtgcacgcttcagttgcccacaccacctagcttctaagggcacactcctggaccctcatagtccttggtgcctgtgacagaatcctgcccagctcatgctgctggcagctctgtgattcacgtgggtgagatcgttgagaatgatgaaggcagcagtatgccacttcagacagttttgtttagagaagttgcactgggcttggctgtgagggctccttttgggtttacctttctgttggtctcgtgatggtaccaattttcggggtacaagtaacctattattttttcatctggtaaaggacataagaagcgtgggccttcaaagaagaaacccggtgcagcaaaagttgaaaaacgcaagactaggtatgtactgctcgcatacagttgaacaggaatttattgcacagccgtcacactgggcagtccactgggcacttgggtgggggtggtctgcaaggggatggagtctggctgggatgggactgggggacaaggtttctgtccttgagtaggagggcccaagcaagggagaatactacccactggctccttcctcccttctttccccactctctgaggctgggcatgggctctccgccaaggtgcctgcagttacctgggtggagggggcctttctgcacccacagcagctctggcctctgagattgcctatgtccttcaactcagatcaaagaacaatgtgtagccaaacaagacacttttcttcaggctggatacagcctcatggccaccagtttgtgctaaaccaaggcaaaggcactggaaatggtgagaaggcgaaagcaacacattaatctgttggaattggagggagagtggtcaagattgtcttccaggtttttctagtgctttggctgaacccagttactcttactactatgtatatctgtatgaatttttaagcttaaatatt

SEQ ID NO: 2772 - DNA, 900 bp, Homo sapiens
  misc_feature (1)..(900): DMRX:72770201
atctcgcctgcacattgctaacactgctcttcctcactccactcactcctcagccgcccctgcactctgtgggctgtcagaaattggtccattccccctcccccgacactattaaaaactcctacaggggggctccttatcctgtatatatttccaggtgctccactccctcccccacacctccctctcccttcctcggggacgcccctcactttaactacccccgggtgactaatacacctttgaaatacttgagataattgctggctctggtgtggagtgtgttgacactgatacctttaaaaggaggggagcagcagacctggcagctagccaggtcatcgggctgtaccaccgtcaataggagaataaacacactgtgatgtactcgtacaatggaatactactcagcaataaaaactaacagactgtcaatgcacacaacaacaaggatgaatctcaaaaaacgttaagttgagcaaaagaagcctgaaaaaaatgagcactgtggctcagtttctataaagttgcggaagaggcaaaattaatctgcggtgatagaaatcagaaaaggggttgccgctggagggatgggtggatactgactgactgcgaagcaacgcaagggaactttctggggcgattgaagtcgtctctattctgatctgtgtgacagttaccaaagtgaatgcattggacaaaaatcagccatctctatacttaaccatttggatttgtgcatttttgtgcatgtaatttatgctcccaatttaaagtgctgccagtataagaaaaggaataaaacaaaaaaaaaattgctaccccaactttctttttgttttatattgttttccacacttttgttctcaatctttctgttttttatttttattttttatt

SEQ ID NO: 2773 - DNA, 1100 bp, Homo sapiens
  misc_feature (1)..(1100): DMRX:74098401
gagcgcctctgcccggctgcaaccccgtctgggaactgaggagtgtctctacccgaccgccaccccgtctgggaggtgaggagcgtctctgcccggccgccccatctgagaagtgaggagcccctctgcccggcagctgccccatctgggaagtgaggagcatctccgcccggcagccgccccgtccgggaggtggggggcagtccccgcccggccagccgccctgtccgggatggaggtggggggcagcccccgcccggccagccaccccatctgggagggggtggggggcatcccccgcccagccagccgccccgtccgggagggaggtggacggcagcgcccaccccgccagccgccccgtctgggaggtggggggcgcctctgcctggccgccccatctgggaagtgaggagcccctctgcccggccgccaccccgtctgggaagtgtactcaacagctcattgagaatgggccatgatgacgatggcagttttgtcgaatagaaaagggggaaatgtggggaaaagaaagagagatcggattgttactgtgtctgtgtggaaagaagtagacatgggggactccattttgttctgtactaagaaaaattcttctgccttgggatgctgttaatctataaccttaccgccaaccccgtgctctctgaaacatgtgctatgtccactcagggttaaatggattaagggcggtgcaagatgtgctttgttaaacagatgcttgaaggcagcatgctcgttaagagtcatcaccactccctaatctcaagtacccagggacacaaacacagcggaaggctgcagggtcctctgcctaggaaaaacagagacccttgttcacatgtttatctgccgaccttccctccactattgtcctatgaccctgccaaattcccgagagacacccaagaatgatcaataaatagtataaaaaataaataaataaataaataaataaaagaatgttgaatattggcccccacactcttctggcttgtagagtttctgccgacagatcagctgttagtctgatgggcttccctttgtgggtaacccgacctttctctctggctgccctt

SEQ ID NO: 2774 - DNA, 2700 bp, Homo sapiens
  misc_feature (1)..(2700): DMRX:74356201
ggctgtagaaaatcagtttatttgaaaatatacaatcagaggagaaaaaaatgaatgaaacagaataaggaaagtatataggatttatgggacagcattaaagagcaaatattggagctaagagttcttaaataagagacacaggggtcaaaatcttgtttaatgaaataatagcagaaaacattccaaatttggagaaagatgtgaatatccaggtacaggaaaggcaaagttcttcaatccaaacaagactacaccaagacatcttataataaaactgtcaataattaaggacaaaaggagaatcctaaaagcaacaagagaaaagaagcaaataaagtataagggactttccataaagctagtaggagatttcttagcagagaccttgcaggccaggagagaatgagataatatattcaaagtactgaagaaaaaatcctgctagtagtgtaacacaaaagcatatgaaagtatacaattcactggtgaaagtaagtacatgatcatattcagaatactctaatactgtaatggcaatgtgtaaatcatttaaatctttagtatgaagtttaacattcaaaactattaaaataacaatagctacaataatttttatgagatacgaaatacaaaaaaaggaaattgtgatgtcaaaaattttagatgtcgggaagggtggagtaaaattgtagagttcttttatgcaatcacagtaatgttgttatcaacttcaattagcctgttataactataagatgctttttgtaagcctcatggtaacaacaaagcaaaaacctatagcagatacacaaaagataaaaagtaaggaatcaaaacatactactggccaggcatggtggctcacgcttgtaatcctagcagtttgggaggctgaagcaggcggatccactgaggtcaggagttcgagatcagcctggccaacatagtgaaaccccgtctctactaaaaatacaaaaatttagcagggtgtggtggcccatgcctgtaatcccagctactcgggaggctgagacaggagaatcgcttgaacccaggaggcagaggttgcagtgagccgagtttgcaccactgccctccagcctgggcgacagagcaagactctgtctcaaaaaaaaaaaaatactactactagaggaaatacataatcacagaaaaaaacaagagagaaataaaagggaaaaatctactaaacaatcagaaaacaatgaacaaaatggcagtagtaagtccttagctatcaatagttaccttgaatgtaataggattaaattttcctgtcacaagacatagagcggccaaatgaattttttacaaaaaccaggtgagatggtgcatgcctatagtcccagctacttgggagactgaggcaggagggttgcttgagtccaaaagtatgactccagcctgggctacctagtgagaccccatctcaacaaaacataaaacattagccgggcatggtggcacacatggtcatcccagctactcaggaggattgcttgagcccagcaggttaaggctgcagtgagccatgatcatgccactgtactccaatcttggcaatagagtgagaccctgtctcacaaaaagaaagaaatacataaaaacaaaacaaaacaaacaacccaaagatgtagttctttttttttaattgtactttaagttctagggtatgtgtgcacaacgtgcaggtttgttacataggtatacatgtgccatgtgggtttgctgtacccatcaactcatcatttacattaggtattccccctaatgttatccctcccccagccccccaccccccaacaggccctggtgtgtgatgtctcccgccctgtgtccaagtgttctcattgttcaattcccgcctatgagtgagaacatgcagtgtttagttttctgtccttgtgatactttgctgagaatgatggtttccagcttcatccatgtccctgcaaaagacatgaactcatccttttttatggctgcatagtattccatggtgtatatgtgccacattttcttaatccagtctaccattgatggacatttgggttggttccaagtctttgctattgtgaatagggccacaataaatatatgtgtgcatgtgtccttatagtagcatgatttataatgctttgggtatatacccagtaatgggattgctgggtcaaatggtatttctagttctagatccctgaggaattgccacactgtcttccacaatggttgaactaatttatactcccaccaacagtgtaaaggcattcctatttctccacatcctctccagcagctgttgtttcctgactttttaatgatcgccattctcaaaagatgtagttctaagagggaagtttatagctataaacacctacatcaaaaaagaagaaagcaaaacaacctaacattgctcatcaacaaactagaaaagaaaaagtataaactaagcccaaagtttgctggaggaaggacatataaataacagtgcagaaataaatgaaatagagactataaaaacaatagaaaagatcaacaaaactaagagtttgtgttttgagaagataaaatcaccaattttttttttttttttgaaatggagtttcgctcttgtttcccaggctggagtgcaacggtgcgatcttggctcaccacaacctctgcctcccgagttca

SEQ ID NO: 2775 - DNA, 300 bp, Homo sapiens
  misc_feature (1)..(300): DMRX:74954701
aaaaagaaatgaacaaagcctccaagaaatatgggactatgtgaaaagaccaaatctacgtctgattggtgtacctgaaagtgacggggagaatggaaccaagttggaaaacactctgcaggatattatccaggagaacttccccaatctagcaaggcaggccaacattcagattcaggaaatacagagaacgccacaaagatactccttgagaagagcaactccaagacacataattgtcagattcaccaaagttgaaatggaggaaaaaatgttaagggcagccagcgagaaaggtca

SEQ ID NO: 2776 - DNA, 100 bp, Homo sapiens
  misc_feature (1)..(100): DMRX:74979401
agggttatactgctcttgtagaatgagtttgaaagtatttcctcctatattttggggaatagttggagtaggattaatattagttcttctttaaatgttt

SEQ ID NO: 2777 - DNA, 300 bp, Homo sapiens
  misc_feature (1)..(300): DMRX:85133501
ttggaaaagcgcagtgtttaggtggcagtgtcctgattttcccagtacagtctgtcacagcttcccttggctaggaaagggaaatcccctgacccctcatgcctcccggctgaggcaatgccccaccctgcttcatcttgccttctgtgggctgcacccactgtccgaccagtcccaatgagatgaaccaggtacctcatttggaaatgcagaaatcacccgtcttctgtgtcaatcatgctgggaactgcagaccagagctgttcctatttggccatcttggaccaatcctctgaagtg

SEQ ID NO: 2778 - DNA, 700 bp, Homo sapiens
  misc_feature (1)..(700): DMRX:86200701
atcattagagaaatgcaaatcaaagccaaaatgagataccatctcatacctcttagaatggctattatgaaaaagtcaaaaaaataacatgctggcaaggttgcagagaaagagaaatggttatacattgtttgtgggagtgcaaattaggtcaaccattgtggaaagtagtgtggtgattcctcaaagacctaaaaacagaaataccctttgacccagcaattccattacttggtatatacccaaaggtatacaaatcattctgtaataaagacccatgcatgcatctgttcattgcagtgcttttcgcagtagaaaagacagggcatcaacctaaatgcccatcaatgatttgattggataaagaagatgtggtaaataaatatcatggaatactatgcagtcatagaaaagaatgagattatgtcctttccacgaacatggctggagctggaggccattattcttagcaaagtaacacgggaagagaaaactaaataccgcatgttctcacttataagggggagctaaatgataagagcttaggaacacagagaaggaaacaacagacaccagggtcttcttgaggggggtgggtgggaggagggagaggatcaggaaaaataactaatgggtactaggattaatacctgggtgattaaataatctgtacagcacacccccatgacacaagtttacc

SEQ ID NO: 2779 - DNA, 700 bp, Homo sapiens
  misc_feature (1)..(700): DMRX:96434601
tgttcaacaaaggattattggcaactgtcatgcacaaggaaggctgctgctgtgctatggtaagttcccgcaattaaggagttgtgagggaaaataaccagaggaaagataatgatgaggggaaataagatacaaaaactattataaatgggacgagtaagacttgaaacttgttgcatttaaactgggcctcaaaatacgtgtaggagttctgcctcaaaacataggtaaaaataagaggttggatggtcctggtagagagtattataaaagcaatggcagtggaaaaggacagataggagcacctgtgtgggggtgaggaggggatgggatgaggggtatattaaatgtgtgtgtgtttagctgaaacataagtactagcaagggagttgttagggacaggtgaaactcaaatgatgaactgcagccaaatcatggagggctttgaatgctagattaaagagagagttggcagacaatggggagacaccaaaggcttttgaggaggagagtgatattcgtttaatgaattagaagatgtatctggtagtgatgtggagggtgatgggagtttaatgaagactaaggcaggaagactactacctggttgtcgttgcagagaaaatatcatggaaaaaaaattgaaatgtaatcccacagcaattaaagtagaacctgaactcctaacatgcaaatgtca

SEQ ID NO: 2780 - DNA, 300 bp, Homo sapiens
  misc_feature (1)..(300): DMRX:97759501
cctatttctccacagcctcaccagcatctgttgtttcttgactttttaataattaccattctgactggcgtgaggtggtgtcttattgtggttttggtgtgcatttctaatgatcagtgatgttgagctttttttcttgtgtttgttgaccacatacttgtcttcttttgagaagtgtcttttcatgtcctttttccactttttgatggggttgtttgttttttttcttggaaatttgtttaagtttcttgtagattctggatattagacctttgtctgatgggtagactgcaaaaattt

SEQ ID NO: 2781 - DNA, 300 bp, Homo sapiens
  misc_feature (1)..(300): DMRX:98155701
gcttgccaattataccagcagcatttgttgaagagggtgtcctttccccactttgtatttttgtttgctttgtcaaagatcagttggctgtaagtatttgggtttatttctggcttctctattctgttccattggtctgtgtgcctatttttatatcagtaccatgctgttttggtgactatggccttatagtatagtttgaaatcaggtaatttgatgcctccagatttgttctctttgcttagtcttcctttggctatggaggttcttttatggttcttctccagaactcttctccag

SEQ ID NO: 2782 - DNA, 1000 bp, Homo sapiens
  misc_feature (1)..(1000): DMRX:98562901
ttctttgatggtagtttgtatttctgtgggatcggtggtgatatcccctttatcattttttattgtgtctatttgaatcttctctcttttcttctttattagtcttgctagcagtctatcaattttgttgatcttttcaaaaaacgaactcctggattcattgatttttttgaagggttttttgtgtctctatttccttcagttctgctctgattttagttatttcttgccttctgctagcttttgaatttgtttgctcttgctcctctagttcttttaattgtgatgttagggtgtcaattttagattttccctgccttctcttgtgggcatttagtgctataagtttccctctacacactgctttgaatgtgtcccagagattctggtatgttgtgtctttgttcttgtcggtttcaaagaacatctttatttctgccttcatttcattatgtacccagtagttattcaggagcaggttgttcagtttccatgtagttgagtggttttgagtgagtttcttaatcctgagttctagtttgatagcaatgtgatctgagagacagtttgttataatttctgttcttttacatttgctgaggagtgctttacttccaagtatgtggtcaattttggaataagtgtgatgtggtgctgagaagaatgtatattctgttgatttggggtggagagttctgtagatgtctattaggtccacttggtgcagagctgagttcaattcctggatatccttgttaactttctcgttgatctgtctaatgttgacagtgggatgttaaagtctcccattattattgtgtgggagtctaagtctctttgtaggtctctaaggacttgctttatgaatctgggtgctcctgtatttggtgcgtatatatttaggatagttagctcttcttgttgaattgatccctttaccatatgtaatggccttctttgtctcttttgatcattgttgttttaaagtctgttttatcag

SEQ ID NO: 2783 - DNA, 200 bp, Homo sapiens
  misc_feature (1)..(200): DMRX:100697901
aaaatagaggataagaaaatccagtatctctgaggtggagaacttaaataataaaacagaaagaaaaagagttctgagacatgatacagaaaaattttccagcaatgaagaaagaactcatcaaggatatatcacatatagggaaaaatgatacagaatgatcaccattgagttacaaccttgttaaattactaaacttt

SEQ ID NO: 2784 - DNA, 1500 bp, Homo sapiens
  misc_feature (1)..(1500): DMRX:100917401
tgaggtcaggagttcaagaccagcctgaccaacatggtgaaacccggtctctactaaaaatacaaaaattagctgggcatggtggtgcatgcctgtaaggaggaagggaagaaagaaagggagaaagagagaaagggaggaagggaggaagacagaaagagagagagagaaagaaagagagaaagaaaagaaagaaaaagaaaaggaaaaagagagaaagaaagagaaagaaagaagaaagaaagaaagaaagaaagaaagaaagaaagaaagaaaagaaagaaagaaagaaagaaagaaagaaagaaagaaagaaagaaagaaatccttggttcagctgtatgggaacttttggaagtcactgaatatctatgtacctcagttctcaattcactgagatactcaagagttgcttatatttgtcatcagcaatgtcaattcattacccccatatgttaggaatctctgagtttgcagcagagtagttcaaaaatttccaaaccctgttgcctcacccatgacatccatggaaccatatgttagagtagtggccctaaagagccaggatgctccctaacctacctaagcctcaactatagatgacacaggtggccctttccttttcttcctttatgtcaaaggatgctgattactaagaaaaatccagtgctctcaagagaagtgggatggctgaggaatactcatccaaaaggaaagctggagttttctgttcctattaaaacacttgatgtagggaaaaggtggccatagagatgtcaacttaatcttttacttttagtggaggaaaagttaagatttcccccatgtaaacccaaaaggaagcacagctctgagttcttcagttttaagtagagtgttggaatctcagagactggaattggagactcttgaagtggtgactcttgtctttctcaaccattctcagtcccatcctcaagagctgatgcaccttatgtaactgggaatgtgagagcatacatccagctgtgtggcgatgctttcccttacattagaactcatttattgattagtagtgtaacagaaggaaaaaaacctgatgcttccaataaatgtcaaaacattttcaatctgtgtccctacaaatacactcatgccataagagaacaaaatacacaggctctggaggcaaacaccctgaattccaatccaatctttgcttatgggaccttgggggaatatacttaaactctcagtgcgtctgtttcttcgtctgtaaaatgagaatgataattatctcatagggttgtggtaaagattaaataaacatttacatgtaaagggcttagagaaatgcctagaacctagtaaattcttttagctgtgttcttctttcttcttcttccttcttcccttcttcctttcctttttctcctcctccccctcctcctctttcttcctattctttgtcatcttcatcatccccctatttccaaaagtatggtaggtgggtttacttta

SEQ ID NO: 2785 - DNA, 200 bp, Homo sapiens
  misc_feature (1)..(200): DMRX:102889401
gagaagtgtctacgttttcagtaattttttttttttttttttttttttgagacggagtctcgctctgtcacccaggctggagtgcaatggcgcgatctcggctcactgcatgctctgcctcccgggttcatgccattctcctgcctcagcctcccgagtagctgggactacaggcgcccaccaccacacccggctatttt

SEQ ID NO: 2786 - DNA, 1300 bp, Homo sapiens
  misc_feature (1)..(1300): DMRX:103499201
ttgatccattgaaaccatattggctatgttcaacataactagagatatctttggtgttttcctcccttagcttcatatcttgtagaacatctcgtacaaaaaaagtagatttacagaaaaacatacatataaatcacgtattaatccccaaatgtagtaaataacatagcaaaaactttatcaaatccatttcatgcacaagctggacagatctgttatatacaatctctatatgcatctgcagtgttttataaattggtgctttgacattaaaaaggaggtttacaaaaaggcccctcttgtactatcgatgactgaattatctcactatcattgcttctcaaatttccttgaatttatactcatcattgccatatcaccattctaacaaaggcggttattttaaggaaaaagttgcagcgtgattatgatataagtaacattcaaaatttcacgttatcaagagttgagcaaagtactaatttcccctttataaacacacgtttaaaacaagagcttcatgcacatccaaatagaaattcaaagtcaaactgtgtaatgtgtttttattgacagaaggcatcacacacattcccaagcagcatggttcccgtgagaaactgaaaactaatttcttgaatctacaatgcgacttccatcttccaggtgtaaccagagtttttcctggagcgattccagcttgtttccttttggtgccttccttaagaaattttgcagctgtttctggtgcagtttttgggtgggctctggggtgggcagacgatctccactttgcagaggctgctcttgtgagtggagctggtggtgagggagtaggagaggcctcgcatcatcctggcattcaggcccttagccatggagaaggacttgaggtggcttcttaaggtactggggagcgggagcttgtccaccagatgcacaggtgtgcaggacacgatggtgcggcagcagaggtcttgcaagctcagtaccttgctcggcctcccgagccaattcatcctgtgccgcagcagcactatcctggccagctccgtgaaagactctatgatgttgaaattgcacagagggctgacctcaaagaaggtcacacccaggcgctcggcgtaggcctgggcctgctccctgggcacctgcctcttgaatgccagatgtaggcgattccccaccaggattttagggacaccaggggcatgttcctcaatcttcttaatccatcgatccataccctcgaaagaccagcggtttgcaatgtcgtagaccaggatcactccttgtgcac

SEQ ID NO: 2787 - DNA, 200 bp, Homo sapiens
  misc_feature (1)..(200): DMRX:105210001
tgatgatcctttcctccccctcctccagtctccaccccatcccctaagttattcctaaaggtaccactgtcccaccaccaccctgaccttataggtccttactaaccctcaggtgccttgtctaacagacacaaaggcaggaaaccccttgggttcccacccccttaccacacagtgtctgctctccttttcccttctgt

SEQ ID NO: 2788 - DNA, 300 bp, Homo sapiens
  misc_feature (1)..(300): DMRX:107113701
gggagccaggattttcccaggcagtctgcctccagagcccatgttcttaatcattatgctaaatgtctctccacaaaaggttattcatttgttcattcattccttccttcaccactgctctgccatgtctatgatccttctatctctaacaaatcattcatccattctcacggccttaacatgttatctaaggatagatgattcccagttctatatatctagttctgacctctctcctgagcttcacggctgcatttccaactgtctcctcaacatctgcatttgatgatcctgccattc

SEQ ID NO: 2789 - DNA, 200 bp, Homo sapiens
  misc_feature (1)..(200): DMRX:111285101
tagactaagaatatccattgggtataagcaaagaaggaggggccctgcaggctagagagtgaggaaggaggtttgaaggagactggttagagaatcattctcactcttcccattgactgaaaaagctttctgcaggaggcttaggaggagagctcaggaaaacttaagggagaggaggcccgaggcttctggagagaaaa

SEQ ID NO: 2790 - DNA, 600 bp, Homo sapiens
  misc_feature (1)..(600): DMRX:113823501
tggggcatttagtccatttacatttaaggttaatattgttatgtgtgaatttgatcctgtctttgtgatgctagctggttattttgcccattagttgatgcagtttttcatagcatcgatggagtttcttcatagtgtcaatggtctttacaatttggtatgtttttgcagtggctggtaccagtttttcctttccatatttagtgtttccttcaggagctcatgtaaggcaggcctgatagtgacaaaatctctcagcatttgcttgtctgtaaaggatttttatttctccttcacttatgagcttagtttggctggatatgaaattctgggttgaaaattattttctttaagaatgttgaatattggcgcccactctcttctgccttgtagcgtttctgcagagagatctgctgttagtctgatgggcttccctttgtgcataacccaaactttctctctagctgcccttaacatttttccttcatttcaaccttggtgaatctgacgattatgtgtcttagggttgctctttctgaggagtatctttgtggtgttctctgtatttcctgaatttgaatgttggcctgtcttgctatg

SEQ ID NO: 2791 - DNA, 1500 bp, Homo sapiens
  misc_feature (1)..(1500): DMRX:115191101
gagtaccgaggccgctcgcatgacgcccacagtgggggctgctctgccgacgcctacagtgggggccacgacagttccagccagagcaaccgctacggaggaggaggctgctacgaggagtaccgaggccgctccctcgatgccaacagtggaggccgctcgcccaatgcctacagcgggggccacgacagttccagctggagccaccgctacggaggaggaggccgctacgaggagtaccgaggccgctcccttgatgccaacagtggaggccgctcgcctgatgcctacagtgggggccacgacagttctggccagagcaactgctacggaggaggaggccgctacgaggagtaccgaggccgcttgctcgatgccaacagtggaggccgctcgcctgatgcctacagtgggggccacgacagttccagccagagcaaccgctatggaggaggcggccgctacgaggagtaccgaggccactcgcttgatgccaacagcggaggccgctcgcctgacacctacagccggggccacgacagttccagccagagcgaccactatggaggaggaggtcgctcactcgatgccaacagcagtggccgcttgcctgacgcctacagtgggggccatgacagttccagccggagccaccgctacggaggaggaggccgctacgaggagtaccgaggccgctcgctcgatgccaacagcggaggccgctcacccaatgcctacagcgggggccacaacagttccagccggaacgacccctgcagaggaggaggccgctacgaggagaaccgaggtcactctctcgatgccaacagcggaggccactcacccaacgcctacagtgggggccgtgacagttccagcaacagttacgaccggagccaccgctatggaggaggaggccactacgaagagtaccgaggccgctcgcacgacacccacagcaggggccgatcgcccgatgcccacagcggggaccactacaccgaagcctacagcaggggccgcgacagtttcagcaacagctatggccggagtgaccattacggaagaggaggctgctacgaggaataccaaggccgctcgcccaatgcctacggcgggggccgcggcctcaacagttccaacaacagtcatggccggagccaccgctacggaggaggaggccgctacgaggagtaccgaggcccctcgcctgacgcccacagtgggggccgcgacagttccatcaagagttacggcctgagcgaccgctacggaggaggaggccactacgaggagtaccagggcagcttgcctgacgcctacagcggcgaccacgacagatccagcaacagttacggccggagcgaccgctactcgaggggtcgagaccgggtaggcagaccggatcgtgggctccctctgcccatggaaacgggcagccctcccctgcatgattcttacagccggtcaggctgcagggtgcccaggggcggaggccgt

SEQ ID NO: 2792 - DNA, 300 bp, Homo sapiens
  misc_feature (1)..(300): DMRX:115665001
ccaacactggccagaaggaagactttgaggaagccaggaagaaggcactgaagcttgggggcaaaaaggtgttcattgaggaagtcagcaaggagtttgtgaaggagttcatctggctggccatccagtccagcgcactgtatgaggaccactacctcctgggcacctctctcaccaggccctgcatcgcccgaaaacaagtggaaatcgcccagcaggagagggccaagtaagtgtcccacagcgccacaggaaagggaaatgatcaggtccagtttgagctaaactgctactctctgg

SEQ ID NO: 2793 - DNA, 300 bp, Homo sapiens
  misc_feature (1)..(300): DMRX:115738701
  misc_feature (250)..(300): n is a, c, g, or t
gcatcgcggccgtacccagacggttcttgacgaggtggacgcaaggcaggcccggccggcccggcccggcccggccaccttcagacgccgcgcacccgccttgttgagacttgccaccctgtcttgttgtgtccatgtccccgaggttgtcttggaggcgggccgttccccgtggtgctcatttctgcctgggggccttccggggaccccgcttgtctttgggggtgcgcaggcccttgccctgcgatcnnnnnnnnnnnnnnnnnnnnnnnnnnnnnnnnnnnnnnnnnnnnnnnnnnn

SEQ ID NO: 2794 - DNA, 200 bp, Homo sapiens
  misc_feature (1)..(200): DMRX:118280401
gcagcagaaacactagttttcctcccagaccacatggaggaccgaggaaggtcggatttagtggtccttaccaacacattctcgaaaacctgcacccttgcctgtcctcctagaccacaaggaggaccaaccaagaaaaatctgatttagtggcccttaccgacgcattctcaaaaacctgttagagtcctaagcattct

SEQ ID NO: 2795 - DNA, 200 bp, Homo sapiens
  misc_feature (1)..(200): DMRX:118367101
tgaaatggtttctgggatttgcttcaaaataatctggcagaggggtggaagaggagtactgatatttttatcattgttgaacatgatcaacatgttgtatatttgggtttataatattattctcccaattttgtatatatttgaaatagccataagtaaatgttggaaaaactccccctaaatatttattgtcacataga

SEQ ID NO: 2796 - DNA, 200 bp, Homo sapiens
  misc_feature (1)..(200): DMRX:121201301
atctacttttgtaccagtactatgctgttttggttactatagccttgtagtattatatgatttgaagttgaggaagataatgcctccagatttgttcattttgattacgattgctttggatatttggggtcttttttagttccattatgaatcttaggactgttttttctagttctgtgaaaaatgaagttggtattttg

SEQ ID NO: 2797 - DNA, 1300 bp, Homo sapiens
  misc_feature (1)..(1300): DMRX:121853801
tagtggagcatggctggggatgcccatgaccctaggctcggcttactcccataggagaccttagacatagaggaactctcagacttgaactctacagggtggtgttgccggtaagatgggcccggtcagacctgagcactcctcagtcggctgacctctccagggtccccagcgtggccacgcctgcttggagcacagcctcgggtgtcaaggggtgataactcctgggggccccacatcacagctcttgcactggtgaaccatgcctgaccagcagagaggtccagcagagcgtcccctgtaggatacgcaccagcccactcgtaccctcctccagctacagctttcccagtgctgctatgcctgcgtgcactcgcccggggccacccaccatatcactttgctggtgcgtgtgtgcgggaacggaccttggctccccttctcccccagcgtgtgtgtgcaggtggaccatgctgtgccactgctgccagcatgagtgcaccccatgccctctctccctgccacaccaccattgcctttggagcgttgctgggaggaaagtctgccagcctcgttcccgccagtgcccctctcctgcgccagcactgctgccagcacaaaattagcacaggaacagctgccccaactccatcctgatcagccaccgccacccacgtgaatgtgcacagaggacacacacagccctgtagccaccagcactgttgcctccgtgccaacagcacgacaagcacgaaggcacacacagtctgtggcaggggcacctcgccaccctgagccatgctgccatcacctgcaacaaatgcccacacagaggccagcaccctggcacccactagcaccctgtcgcagccaagaagcatggaccgcactgtgctgcctctgctgctgatcctggcatgcataaatgaggacggagcccgctgccactgccctttgaagaactttggctggcaccacccaagttgtgaccagtggtccaggagcacctcagcccctgcagtgcagcaaattcctaatctccaggagccaaataacaaagccagggcctgatacccgctcctcagagttatagaacccagtccaggagtcctgagctgagccttggccccctaaaatcttcagaaacaaagccagttgactgaacccatcttatactaaaatcaaacagtcaaggtcatcaaatacgataaaagaaaaaaaacccaaaagacagcaacttcaaaaattgaaggaatatcagcctggaaagaaaagaagaaaccagcatataactccaaaa

SEQ ID NO: 2798 - DNA, 300 bp, Homo sapiens
  misc_feature (1)..(300): DMRX:125133301
cttcttactcctttcttaggaacataggccactggtaattcttcaagtatcactaagaacttaatttgtcaaactcaaggtgtagccttaattttcttcttgaactgactgtctcagagtttatttagaacagtttccccatcaccccatccctacccccaaggttacaaacgatactctccggatcattactccaacatcaagataatcctttaagcatgcacagaggaataatggcatcaagagaaattagcagcttttaaagcatcccctaaagtccttgtctcctcccctctcact

SEQ ID NO: 2799 - DNA, 500 bp, Homo sapiens
  misc_feature (1)..(500): DMRX:125931501
ctgggatttgcaattcctaatacaggacttcttatacagcaggatttttttttggtcattttgccaaccaaggacctccatggctggtgatgcccccatgccagcctgcacctcacttggccctgggcctgctgctggagtgccccaagtacttggaccacctgtgttatagcttgtacccatgttcagtggttcccaaactcttgttgacgtccaagaagaaagaggataccctgacaattcaaagggtgaggaggatagagaggaattttgttgagtgatagaacagctatcagcagaaaggctatgtgggggtggtcccccaccctgcaatcaggtggtttatctctcagtgtggctgagtctgggggttttatggagtcagaatagggaagtgaatgctgatcggtttgtgagtatgcaaagaaaggctaaagcaaagacaccattcaaaggtgggcatggcagtgtagaaaaccaattaggaaaggataggtata

SEQ ID NO: 2800 - DNA, 1100 bp, Homo sapiens
  misc_feature (1)..(1100): DMRX:126866001
ctctactccctccttggtgactgatcatgcaccccttaccatctcattaaaacctaatcatccttaccctgctcaatgccaatatcccatcccgcagcttgctttaaaaggattaaagcctgttatcactcacctgctacagcatggccttttaaagcctataaactctccttacaattcccccattttacctttcctaaagccagacaagccttacaggttagttcagcatctgtgccttatcaaccaaattgttttgcctatccaccccgtgatgccaaacccatatactctcctatcctcaataccttccttcacaacccattattctgttctggatctcaaacatgccttctttactattcctttgcacccttcatcccagcctctctttgctggacttggactgaccctgacacccattaggctcagcaaattacctaggctgtactgccgcaaggcttcacagacagctcccattacttcagtcaagcccaaatttcttcctcatctgttacctatctgggcacaattctcataaaaacgcccgtgccctccctgctgattgtgtctggctgatctctcaaaccccaacaccatctatgtcctaggcatggttaggtattttcgactttagatacctggttttgacatcttaacaaaaccattatataaactcacaaaaagaaacttagctgaccccatagatcctaaatcctttccccactcctttttcagttccttgaagacagctttagagactgcccccgccctagctctccctgagtcatcccagcccttttaattacccacagccgaagtgcagggctgtgcatttggaattcttacacaagaaccgggactgcaccctgtagcctttttatccaaacaacttgaccttactgttttagcctagccctcaagtctgtgtgcagcggctaccgctgccctaatacttttagaagcccttaaaatcacaaactatgctcaactcactctctacaggtctcataacttccaaaatctattttcttcctcacacctgacacatatacgctctgctccccagctccttcagctgtactcactctttgatgagt

SEQ ID NO: 2801 - DNA, 1900 bp, Homo sapiens
  misc_feature (1)..(1900): DMRX:135811901
aatgggttaataatatctaccagcacaggtgggaatacaaaataaccaaaacacaagttatcctttcaaataaaacgctttgggaaaaagaacatcttttactaacagaaatttcttagcctctggaaggccagttgattcggtaacatatgccaggagacttcagcaatatcctgctccattgtagaaaacagcaatctgatccttttctctcctcaatcattaatgagattatgcatttggggtgtgataatcctccagggacaagtattctcaaatcatacgtttcagtttcttcttaaggtgcttaacaaagtctcgtctcatacatctgaagagaaagagacatgtcattaaccaaaagatagccaaagaacctatgctgtaggaagcgctgtgacagatagaaagatgaagtaacagtcagcatggaaatagaaatgtatctgcatggtaagaggcagtctagccggcatagcaaatgctggcaagggtgtggagaaaagggaaccctcatacactgttggtgggaacataaattactacaacaactatgaagaacagtttggaggttcctcaaacaactaaaaatggagctatcatatgatccagcaatcccactgctgggtatatacccaagagaaaggaagtcagtgtaccgaagagatatctgcactcccatgtttcctgcaccaccattcacagtagccaagatttggaagcaacctaagtgtccactaacacgtgaatgggtaaagaaaatatggtacatatacaccacagagtactgtttagccataaaaaaaagaatgagattcagtcatttgcaacaacacggatagaaccgaaggtccttatgttaagtgaaataagccaggcacagaaagacaaacttcacatgttctcacttatttttgggagtaaaagtgtaaaacaactgaactaatggagatagagagtagaatgacagttaccagaggctacaaaggttagtgggggtggagggtgtgggaagtggggatgattaatacgtagaagtatggaataaataagatgtcgtatttcatagcccaacagggtgactatagtcggtaataatttaattgcacatttaaaaataatgaagagtataattgtattctccccgtaacgcaaaggataaaagcttgaggtgatagaaaccccacttaccttgatgtgattattacacattgttgtctgtatcacaatatctcatatagcccagaaatatatgcatctgctatgtgcctacacaaattttttaaaaagaggtagtctagcaaatacaaagagtgtcaattgagggacaatgcgcacctcagactatggtgaaaatggaagtctccatagtcttcgaagaatgagttagactcagataacattagcctaagtaactgtggagacagccgtaactgtgagtgaggaccagggtttgagaaacgcaaggcaggggctgttccccaacgctcacccccagtgctctattgagcccaagtgcttaaagaaattggacagttcctatttctacccaccttgctgcttccttgatgatggattcaaaaaatcgtttcctgactgcagtaggtccttgcactccttcaagcatttcgaagattttttcatattctgaagatgttgaaaaaaaaaaacttcagtattatcaaatataaagaagaatagaagtgaatctacacctcagcaatcatgcttcagaggctgaaatgttttaaatgcttaaatcaagatacctgcacatacaaaacctaaataataaaaaagacacctgcacatacatacgaatgtaactcctttaaccataaccaagtaagaaaagaaaaagaaaaaatgtacatgctttagtcaaagaaaagaggaacca

SEQ ID NO: 2802 - DNA, 3800 bp, Homo sapiens
  misc_feature (1)..(3800): DMRX:135829101
agttataaacgccagctacatcagtgtgagctgctgcagaaaccacgactgtaatagtatttacctaatgggttaataatatctaccagcacaggtgggaatacaaaataaccaaaacacaagttatcctttcaaataaaacgctttgggaaaaagaacatcttttactaacagaaatttcttagcctctggaaggccagttgattcggtaacatatgccaggagacttcagcaatatcctgctccattgtagaaaacagcaatctgatccttttctctcctcaatcattaacgagattatgcatttggggtgtgataatcctccagggacaagtattctcaaatcatacgtttcagtttcttcttaaggtgcttaacaaagtctcgtctcatacatctgaagagaaagagacatgtcattaaccaaaagatagccaaagaacctatgctgtaggaagcgctgtgacagatagaaagatgaagtaacagtcagcatggaaatagaaatgtatctgcatggtaagaggcagtctagccggcataacaaatgctggcaagggtgtggagaaaagggaaccttcatacactgttggtgagaatataaattactacaacaactaactatgaagaacagtttggaggttcctcaaacaactaaaaatggagctatcatatgatccagcaatcccactgctgggtatatacccaagagaaaggaagtcagtgtaccgaacagatatctgcactcccatgtttgttgcagcaccatccacagtagccaagatttggaagcaacctaagtgtccactaacacatgaatgggtaaagaaaatatggtacatatacaccacagagtactgtttagccataaaaaaaagaatgagattcagtcatttgcaacaacacggatagaaccgaaggtccttatgttaagtgaaataagccaggcacagaaagacaaacttcacatgttctcacttatttttgggagtaaaagtgtaaaacaactgaactaatggagatagagagtagaatgacagttaccagaggctacaaaggttagtgggggtggagggtgtgggaagtggggatgattaatacgtagaagtatggaataaataagatgtcgtatttcatagccaaacagggtgactatagtcggtaataatttaattgcacatttaaaaataatgaagagtataattgtattctctgtaacgcaaaggataaaagcttgaggtgatagaaaccccacttaccttgatgtgattattacacattgttgtctgtatcacaatatctcatatagcccagaaatatatgcatctgctatgtgcctacacaaattttttaaaaagaggtagtctagcaaatacaaagagtgtcaattgagggacaatgcgcacctcagactatggtgaaaatggaagtctccatagtcttcgaagaatgagttacactcagataacattagcctaagtaactgtggagacagccataactgtgagtgaggaccagggtttgagaaacgcaaggcaggggctgttccccaacgctcacccccagtgctctattgagcccaagtgcttaaagaaattggacagttcctatttctacccaccttgctgcttccttgatgatggattcaaaaaatcgcttcctgactgcagtaggtccttgcactccttcaagcatttcgaagattttttcatattctgaagatgttgaaaaaaaaaaaacttcagtattatcaaatataaagaagaatagaagtgaatctacacctcagcaatcatgcttcagaggctgaaatgttttaaatgcttaaatcaagatacctgcacatacaaaacctaaataataaaaaagacacctgcacatacatacgaatgtaactcctttaaccataaccaagtaagaaaagaaaaagaaaaaatgtacatgctttagtcaaagaaaagaggaaccaccataaattatgtgcaatctcaactctggcaaagaatgaaactcaacaggcaacatgaatatcttctgaatcatagaaagagagacttcctatagttttataaaacagacattcttatattacttactttgtccaacgcatcggagttccttcactaatttacgttttatatcagcattaatttctcgttggcttttgggagaggaggctgtttctctgcattctaggtcatctccagagaaactgctggtaacgtttcctcccacaggtgcattgctaccaggtttctgcatcatcccatctttgctgaaaccagtgaagtcatcaatctgagaatccaattggctgggtggaatagcatgtcctgtcataagctctggtgaaacagattttgagtaaaagccatcagttggtgtttgaccactttctttcccctccacatagacctcatgaatgacagctctggaaatcaaactgagaagctgagctgtgagatatgtgtgtttcatcacccctctgggtacatctatgtgctcctcagtttctagggaattatttatttcataaatgggaggatacaccagggagaaatcccaggcctgacaaacggaggccaggacacataatacaataaaaccacctcttattttctggccctatgaatagacatggaaaccaagtaaggcagtacaactctaaagcaacattcacagatccctggtactcatgggacagtttcagcttgttatgctttacaagttgaaagcagcaagtctcacttgatatcatgatttctcaaattcacttacaaactgccatgctttactgagctggaacccaggcaactgggatacaactcaaccggtctcctgttatatcaaacacattctgagaaaatagaggcggccattactgctaaaagttctatacgcactccaccaccaaaaagtcccttttactgtatgattttcctcatccttcctttctttctcacaaaagtgactttcttttcactccaggtctgacacctctcatttattcatcgtctgtggcaggcagcgtgccggtagctggggatcagcagtaaacagcccagagagcaacgttccctgcccttgtggagctcacatcctcatggggcggtcagacagtacgtgcacaatgagcaaatgaaacatacagtgttgggctagtggtaaggaagcagtccacaggcctgtgggcaacagcagcagagggagccccaggagctgctgctggttgggcagagccttctgtggaggtacccttgggcagggcttgaaggaaaaagcagagctgcctgcgcagaggcagagggggagttccaggttgcggtgaggccaaggatatgggctggagtggggatggaccgggcactatggggtgaaggacagtagcagagagagtcaggagatgatggggcccgtgtgaggagagggtgacggaggccaggccacgcagaacctcgcagaccaaagctgcttcgcagtcggttctgagtgcttaggagtgttgaggatgggtgttcaggagcgacatggcatcacgtgatttacatgccaacatcatgacccggctgcagggttggagggtatgtgtttgatgcgggaaataatgggaaacatggaggtatctcaggagctcagtgattgatcgtggcagagtggaatagaaggagagagagagatgctggggttcaggaattttttacagtatttagagaagagaagaaaaagaaatgtagaaaaaaacaatgatggggtcgggggcggtggctcgtgcgtgtaatcccagcactttgggaggctga

SEQ ID NO: 2803 - DNA, 1100 bp, Homo sapiens
  misc_feature (1)..(1100): DMRX:135864501
aaaagaatgagattcagtcatttgcaacaacacggatagaaccgaaggtccttatgttaagtgaaataagccaggcacagaaagacaaacttcacatgttctcacttatttttgggagtaaaagtgtaaaacaactgaactaatggagatagagagtagaatgacagttaccagaggctacaaaggttagtgggggtggagggtgtgggaagtggggatgattaatacgtagaagtatggaataaataagatgtcgtatttcatagcccaacagggtgactatagtcggtaataatttaattgcacatttaaaaataatgaagagtataattgtattctccccgtaacgcaaaggataaaagcttgaggtgatagaaaccccacttaccttgatgtgattattacacattgttgtctgtatcacaatatctcatatagcccagaaatatatgcatctgctatgtgcctacacaaattttttaaaaagaggtagtctagcaaatacaaagagtgtcaattgagggacaatgcgcacctcagactatggtgaaaatggaagtctccatagtcttcgaagaatgagttagactcagataacattagcctaagtaactgtggagacagccgtaactgtgagtgaggaccagggtttgagaaacgcaaggcaggggctgttccccaacgctcacccccagtgctctattgagcccaagtgcttaaagaaattggacagttcctatttctacccaccttgctgcttccttgatgatggattcaaaaaatcgtttcctgactgcagtaggtccttgcactccttcaagcatttcgaagattttttcatattctgaagatgttgaaaaaaaaaaacttcagtattatcaaatataaagaagaatagaagtgaatctacacctcagcaatcatgcttcagaggctgaaatgttttaaatgcttaaatcaagatacctgcacatacaaaacctaaataataaaaaagacacctgcacatacatacgaatgtaactcctttaaccataaccaagtaagaaaagaaaaagaaaaaatgtacatgctttagtcaaagaaaagaggaaccacca

SEQ ID NO: 2804 - DNA, 4500 bp, Homo sapiens
  misc_feature (1)..(4500): DMRX:135880201
ggctgaagcacaaggatcgcttgaactggggtgaggtcgaggtggcagtgacttgtgatcgtgtcaccgcactctagcctgggcaacagagcaagattctgtctttaaaaaaaataaaaagcatagaacgttcaagtcgtatctggaaacaacagccttacagggactgctactgcagctccaaattattgtatcagaccaatcctatctaggaactacctttattatatatattggatatacccccccacacacgcatacatatatatatatgggggtgtatatataatatgtgtaatgtgtattatatgtataatgggagattagaaagtgtgtgtgtgcatgtatatataccccctaccaacacacacacacacacacacacacacacacacacacacacacacattaaaatctcccattagttctgccttttcgttgaaggctgatgatacagatttcaacattgagatcgggttcccaccacacgaggggctaaggaagagtatgtgtgatatgtctagagagcttcttagtcctcctgtgtttttcgattagagttaatggaaaatcacagcaaccccatccaggcaggatatctaatggttcagactcttccgtaatgaaggtttgagtcatcttgccaggccaagcatcatgaccaactgacatgctatctcagggcaaagggaatgcgaaacgggtagcgaaagaaggtagttataaacgccagctacatcagtgtgagctgctgcagaaaccacgactgtaatagtatttacctaatgggttaataatatctaccagcacaggtgggaatacaaaataaccaaaacacaagttatcctttcaaataaaacgctttgggaaaaagaacatcttttactaacagaaatttcttagcctctggaaggccagttgattcggtaacatatgccaggagacttcagcaatatcctgctccattgtagaaaacagcaatctgatccttttctctcctcaatcattaacgagattatgcatttggggtgtgataatcctccagggacaagtattctcaaatcatacgtttcagtttcttcttaaggtgcttaacaaagtctcgtctcatacatctgaagagaaagagacatgtcattaaccaaaagatagccaaagaacctatgctgtaggaagcgctgtgacagatagaaagatgaagtaacagtcagcatggaaatagaaatgtatctgcatggtaagaggcagtctagccggcataacaaatgctggcaagggtgtggagaaaagggaaccctcatacactgttggtgggaacataaattactacaacaactatgaagaacagtttggaggttcctcaaacaactaaaaatggagctatcatatgatccagcaatcccactgctgggtatatacccaagagaaaggaagtcagtgtaccaaagagatatctgcactcccatgtttcctgcaccaccattcacagtagccaagatttggaagcaacctaagtgtccactaacacgtgaatgggtaaagaaaatatggtacatatacaccatagagtactgtttagccataaaaaaaagaatgagattcagtcatttgcaacaacacggatagaaccgaaggcccttatgttaagtgaaataaaccaggcacaaaaagacaaacttcacatgttctcacttatttttgggagtaaaagtgtaaaacaactgaactaatggagatagagagtagaatgacagttaccagaggctacaaaggttagtgggggtggagggtgtgggaagtggggatgattaatacgtagaagtatggaataaataagatgtcgtatttcatagcccaacagggtgactatagttggtaataatttaattgcacatttaaaaataatgaagagtataattgtattctctgtaacgcaaaggataaaagcttgaggtgatagaaaccccacttaccttgatgtgattattacacattgttgtccgtatcacaatatctcatatagcccagaaatatatgcatctgctatgtgcctacacaaattttttaaaaagaggtagtctagcaaatacaaagagtgtcaattgagggacaatgcgcacctcagactatggtgaaaatggaagtctccatagtcttcgaagaatgagttagactcagataacattagcctaagtaactgtggagacagccataactgtgagtgaggaccagggtttgagaaacgcaaggcaggggctgttccccaacgctcatccccagtactctattgagcccaagtgcttaaagaaattggacagttcctatttctacccaccttgctgcttccttgatgatggattcaaaaaatcgtttcctgactgcagtaggtccttgcactccttcaagcatttcgaagattttttcatattctgaagatgttgaaaaaaaaacttcagtattatcaaatataaagaagaatagaagtgaatctacacctcagcaatcatgcttcagaggctgaaatgttttaaatgcttaaatcaagatacctgcacatacaaaacctaaataataaaaaagacacctgcacatacatacgaatgtaactcctttaaccataaccaagtaagaaaagaaaaagaaaaaatgtacatgctttagtcaaagaaaagaggaaccaccataaattatgtgcagtctcaactctggcaaagaatgagcctcaagaggtaacatggatatcttctgaatcatagaaagagtgacttcctacagttttataaaacagacgttcttacactacttacttcgtccaaggcatcggatttccttcactacttgacattttatatcagcattaatttcttgttggcttttgggagaggaggctattcctctgcattctaggtcatctccagagaaattgctggtaacgtttcctcccacaggtgcattgctaccaggtttctgcatcatcccatctttgctgaaaccagtgaagtcatcaatctgagaatccaattggctgggtggaatagcatgtcctgtcataagctctggtgaaacaaattttgagtaaaagccatcagttggtgtttgaccactttctttcccctccacataaacctcatgaatgacagatctggaaatcaaactgagaagttgagctgtgagatacgtgtgtttcatcacccctctgggtacatctatgtgctcctcagtttctagggaattatttatttcataaatgggaggatacaccagggagaaatcccaggcctgacaaacggaggccaggacacataatacaataaaaccacctcctattttctgtcgccttgaatagatatggaaaccaagtaaggcagtacaactctaaagcaacattcacagatccctggtactcatgggacagtttcagcttgttatgctttacaaggtgaaagcagcaagtctcacttgatatcatgatttctcaaactcacttacaaactgccatgctttactgagctggaacccaggcaactgggatacaactcaaccggtctcctgttatatcaaacacattctgagaaaatagaggcggccattactgctaaaagttctatacgcactccaccaccaaaaagtcccttttactgtatgattttcctcatccttcctttctgtctcacaaaagtgactttcttttcactccaggtctgacacctctcatttattcatcgtctgtggcaggcagcgtgccggtagctggggatcagcagtaaacagcccagagagcaacgttccctgcccttgtggagctcacatcctcatggggcggtcagacagtacgtgcacaatgagcaaatgaaacatacagtgttgggctagtggtaaggaagcagtccacaggcctgtgggcaacagcagcagagggagccccaggagctgctgctggttgggcagagccttctgtggaggtacccttgggcagggcttgaaggaaaaagcagagctgcctgcgcagaggcagagggggagttccaggttgcggtgaggccaaggatatgggctggagtggggatggaccgggcactatggggtgaaggacagtagcagagagagtcaggagatgatggggcccgtgtgaggagagggtgacggaggccaggccacgcagaacctcgcagaccaaagctgcttcgcagtcggttctgagtgcttaggagtgttgaggatgggtgttcaggagcgacatggcatcacgtgatttacatgccaacatcatgacccggctgcagggttggagggtatgtgtttgatgcgggaaataatgggaaacatggaggtatctcaggagctcagtgattgatcgtggcagagtggaatagaaggagagagagagatgctggggttcaggaattttttacagtatttagagaagagaagaaaaagaaatgtagaaaaaaacaatgatggggtcgggggcggtggctcgtgcgtgtaatcccagcactt

SEQ ID NO: 2805 - DNA, 100 bp, Homo sapiens
  misc_feature (1)..(100): DMRX:137110401
caaagttgaaagaaatttgcaatgaacaaccacatggtaccattggattttataattaacattttgctatttttgcttcattatccatctgtccatctat

SEQ ID NO: 2806 - DNA, 1100 bp, Homo sapiens
  misc_feature (1)..(1100): DMRX:137417001
aaacccctccccacccctcttgttcctgttgttcacagacccccatgttttgctgaaataaattgagcatcattctatagctaaatgcaaacaccgtagagcaggtattaaatcaatttgtttccgttgcaatcaaataggccccagatcagtgaaaagaggcaggcagaagaaagaaataatattgtgttgtaattgttgtcaatatgcaaaagtcacacatcttactccatatttccagggttttaaaggacagtatccccatacaacagagtgaaagcagagacacaggatagcaaaggatgaggaacaaaaaggaattgttcttttcacacaggaagttctctattaagaaatttaaaaatatattataaggtattattggaataatttacctaaagttataaaacactatttagtgaaaaacgcatcaatcatgtgaagctaatattgcttttattgctttattttaaaatttttctaatattcctaggacaattatagttgttgcttgtatcctttctaccatttaaatgcataaataaggttaaggatcaagcactctttgcaaacattttaaatatatgaattaaaaatgtaatgatgtagccaggcatggtggctcacgcctataatcccagcactttgggaggctgaggttggcggatcgcttgagtccaggagttcaagaccagcctggccaacatggcaaaagccctctctactaaaaatacaaaaattagccaggtgtggtgggcacagacctgtaatcccgctactgggtggggggaggggtggggtggtgctgaatcaggaggatcgcttgagcctgagaggtcaagatcaagccaccgcacttcagcctgggtgatggagtgggaccttgtctcagaaaagaaagaaaggaaagaaagaaaggaaataaagaaagaagggaaagaaagaaagaaaggacgaaagaaagaaggaaggaaggaagggaggtagaaagaaagagagagagaaagaaagaaaaagaaagaaagagaaaaaatatttttaatgtaatgtgaacaacaaaaaaagaggaggaaaaaggagaaagaaagaggaggaagcag

SEQ ID NO: 2807 - DNA, 1300 bp, Homo sapiens
  misc_feature (1)..(1300): DMRX:139859101
ttacactacaaaaatatttttatgtgtttaaaaagggagctttctaaataagctgatctcatagaagtagagagcagaatagcggcaactacaggctgggaaggataggcaggagggatggctcttggattcaaaattactgctagacaggaggaataagttacagtgttctatagcactgtagggtgactacaattaataatttattccatattttcaaatagccaagagaaaatgttgaatattctcaacacaaagaaatgataaatgtttaaggtgatggatatgctaatcaccctgatttgatcattacacattgtatacatgtattgaaatatcactctataccccataaatacattatgtgtcaattaaaagttgttataaaaaaattaaatggaactttccatcaggattagatttacccatgtgttatgtcaaattcaaacaaaaaagagctaagtattcctacaactagacaaatattgcaaccttaatgtgttaccagaaggcagacatattcaaccctcacgtaaacagtaaaaaagagaaaacctttatgaaacggaatgaaggatgatctctccttacaaacacaattttgcataatgcatttgtgtctagttacatggaaaatggaaccaattgtttaaagccagaagggtatataaatgccaattttcaacaatatatatggcacaaatgaaaagaaagtgcttggctgggcgcggtggctcacgcctgtaatcccagcactttgggaggccgaggcgggcggatcacgaggtcaggagatcgagaccatcccggctaaaaacggtgaaaccccgtctctactaaaaatacaaaaaaaaattagccgggcgtagtggcgggcgcctgtagtcccagctacttgggaggctgaggcagaagaatggcgtgaacccgggaggcggagcttgcagtgagccgagatcccgccactgcactccagcctgggcgacagagcgagactccgtctcaaaaaaaaaaaaaaaaaaaaaagaaaagaaagtgcttaacaaaagaaaatggaaaaggcttttttaaaacagaatagagttcattagacttttcatgactataattagaaaagatatttctatgttgctataggtagagagatgcagcaagagtaaaactgcaccatttatgccaactctccttgcatagtgactgcaacttaccaatgaattatttccaatctaatttaccatttgaggacttgaaatagaaaatttaaaaaaacagatatacaggttttaagagataggagaaa

SEQ ID NO: 2808 - DNA, 1200 bp, Homo sapiens
  misc_feature (1)..(1200): DMRX:140671601
ttttcttatcttttcagtttgtttagtaacttgcctgaactaatttttaaagagattatcttctctgtagtgtctttattgattgtttaaattcttgttttacagttttttttttaagtttggctcccgaggaactgtgactggatcaataagcacagtggacagccagttattattcagaggtttgcttaaacaacttgagccagtaaggcttccacccttgcaaactgatatatgaaattcagtttggaagctaaattggagaatttcaaaattcagacagtttataagttggccccaagttttactttctgctgggtcttctcctgtcttctctgcacatgtgcaagatcttagattcaatcaggcctactagtagatctctgagatcttctcctgtctcttctaagtagaagcagccttacacatttgcagagccttccaaatcaccagagatacctggtagcttgtcaaggcccactgtggctcttattttcctgttaaattttgggctgttttgttgatgacctcgagcagtattgcagcctcaagcagctgcgacattggccttctctgacactgaaagccattatttttgacaatgcccctgggtttggagctttttctctactccaaatcaagtcagtaccctctggcagtagagctcctggtttcacagcttgccttgctctggtagaattactgtgatggcagccgggtggttgagaggtcaacaccagagacccccctgttcttgccaaagttcagtactttttcttatgtaaatgcttttcaatctgtgggatgcctctggtcaatagacagagtcctgaaatagctgtttttgaaaattttttgagtgtcatcattgcctttgaggaagggatttgctgagctcctcactctatcattctcacattcctgctccctcccacagttcctttatttctacctctgccatctgttaggacaactcaagtatttccttattggcgagtattggccatggctttttccaggcttctaagatactcccagtaacatatatgcctgcactcatgaggttcttgttggtgttcaatgtcatggtaagaaagtgctccctggtcaatgaactcttgattatacaattttacactctagctcccagaacagtctcaatatccaatcccaggcatactcatatagatcccctggatc

SEQ ID NO: 2809 - DNA, 1100 bp, Homo sapiens
  misc_feature (1)..(1100): DMRX:141559201
actttatggctcaccaacataaatgaaaatatacggcaacatctatacatgcacatgtatgttccaaggaatttcatttgcaatagctaataatctagaataaactcaaatgcccatcaactggtaatggatcatcggggtatattcatacaatagagtgcaactcaggaatccaaaggaacgaactactgttatatacaacatatagatggatatcaaacacattatgctaagtaaaagaagccagaggaaaaaagtatacaagtagtataatcctatttatgagattgtacaagaagtaaaactaatctattggaaaaaatagatcaatgatatggctgaaaatagcgaggacttctagcaaagggccacaaaaatatttttaaggtagagaaaatattctatatcttgattgtcagcgtgaatgcatgggtgtaaaaatttgttaaaatgacaaactgtacacttaaatagttccattctattgtacataaagtataactcaatgcaattgattttcaatgtttacatatgtgtgtgtgtgtattttggcatgtgtttgtaagaggtggcgaatgaagtgcaggagtgcatactaggctatttgattacgtttgcgctgtagacgtggggtcgaggaatgtaattttttgaaactttcttatcttgtaaggtttattttttcaaaaacagtaagcatgcattacttttgaaagttaataaataagatagagacacaattaaaaggtaaaaggcaagttctatttattcatctctttcccagctccataccgtagggtctagcacaaatgtgataatacgggactttgaattatttaatcttttaaatagaggagcaggtatcctgcagtcctgacaaatatcaagtgctttatgccttatcctggttgagtttcccatgatggttaatggtggcatcatccttacgggtctctgcgctcgaaagtcggctgtcattttcgatattcccaagttgacaggcctgttttctcccctctgttccatctcacatctgtttattgaaattatgcctacccgacaagttctagttgaaataactctcccaggaaggatgggca

SEQ ID NO: 2810 - DNA, 100 bp, Homo sapiens
  misc_feature (1)..(100): DMRX:142118601
ctaccaaaaatacaaaaaaaaaaaaaaaaaaatagccagtcatggtagcgcatacctgcagtcccagctactaggaaggctgagtcaagaggctctcttg

SEQ ID NO: 2811 - DNA, 700 bp, Homo sapiens
  misc_feature (1)..(700): DMRX:145352901
aatgtctgctctgtgaaagatactgttaagaaaatgaaaatacaagaggacaccaacaaatggaaaaacattccatgctcatggataggaagagtcaatatcaggaaaatggtcatgctgtgtaaagtaaattatagattcgatactactctcattaaattaccattgacattcttcacagcattagaagaaactattttaaaattaacatggaaccaaaaacagagcctgaatagccaagacaatcctaaggaaaaaaaaaaaaactggtaccaaaacagacaaataaaccaatggaacagaatacagaactcagaaataagactgtacacctacaatcatctgatcttcaacaaacctgacaaaaagcaagtaatgggaaatggattccctattcaataaatggtgctgggagaaatggctagccatatgcagaagattgaaactggaccccttccttacaccttatacaaaaattaagtcaagatggattaaagacttaaatgtaaaactcaaaactatgaaaaccctagaagagaatctaggcaacacctttcaggacatgggcactggcaaagatttcatgacaaacataccaaaagtaattgcgacaaaagcaaaaattgacaagtggggtctaattaaactaaagagctctgcacagcaaataaactatcaacagagcaaacaaacaacctat

SEQ ID NO: 2812 - DNA, 200 bp, Homo sapiens
  misc_feature (1)..(200): DMRX:146952401
atcgtaataggtctccgttcacttagaagcaacagggatgagaaataggcagtctataagctatctaatcagaaatttgggctcgtcttgggaggatggcagggtgtgggtgacaaatgagagtgaagagtattaagggagctaaatgttgtctttcataatgataaaacaatagaaaatgtgcaaacgtattgtttaga

SEQ ID NO: 2813 - DNA, 300 bp, Homo sapiens
  misc_feature (1)..(300): DMRX:147511301
tactgtcctctagcctgggtgacagaaaaagactccatctcaaaaaaaaaaaaaaaaaagatgaaatagcatgtgtcatgactctaggcagcaaagaggatgacatattcaaagacaagaaagaagactagaaagaaagaacaagaaccgtcattagaaaggaaatttagagcaagactattggaaaatgattactaacagtaacatattagaattttatttaggaaaactctgcatctattgaaaataatttattcaaacatcaacatgataatctgctgcattggtgataaattagaa

SEQ ID NO: 2814 - DNA, 400 bp, Homo sapiens
  misc_feature (1)..(400): DMRX:150883501
ccccagaggattgcaagaaaggctgccttgatgatggcaaaacaaagcgaaaatggtagaaactttaaggtagtcccagactaatcacacaaggcacctgacaaaaaccaaacataaattcttctctggaagaaggcaaatttaccctagacttcaaagattccccagatatatatttcagttacaataagcagtacacagccaaaaaaataaataaataagtaaaccaccaagcacacgaggaaataaagaatcatgagtgagtattagtagaaaaagaataaacaggaaaatgagccaaagacaaccaggcaattcataaaagaggaaaccaaactggaagataaacataggaaaagatgttcaacctcattagtaaccagaaagatgcaaacgaaac

SEQ ID NO: 2815 - DNA, 1600 bp, Homo sapiens
  misc_feature (1)..(1600): DMRX:152701701
tggtaaagatcagtggaggacctcacatttcctacccacccctgcatgagtgggttttgagagagggggaagagtgagtctgagcacgagttgcagccagggccagtgggagggggtctgggccagtgcaccttccggggccgcatcccttagtttccactgcctcctgtgacgtgaggcccattcttcactctttgaagcgagcagtcagcattcttagtagtgggtttctgttctgttggatgactttgagattattctttgtttcctgttggagttgttcaaatgttccttttaacggatggttgaatgagcgtcagcatccaggtttatgaatgacagtagtcacacatagtgctgtttatatagtttaggagtaagagtcttgttttttactcaaattgggaaatccattccattttgtgaattgtgacataataatagcagtggtaaaagtatttgcttaaaattgtgagcgaattagcaataacatacatgagataactcaagaaatcaaaagatagttgattcttgccttgtacctcaatctattctgtaaaattaaacaaatatgcaaaccaggatttccttgacttctttgagaatgcaagcgaaattaaatctgaataaataattcttcctcttcactggctcgtttcttttccgttcactcagcatctgctctgtgggaggccctgggttagtagtggggatgctaaggtaagccagactcacgcctacccatagggctgtagagcctaggacctgcagtcatataattaaggtggtgagaagtcctgtaagatgtagaggaaatgtaagagaggggtgagggtgtggcgctccgggtgagagtagtggagtgtcagtgccctgagctggggcattttgggctttgggaaacttcagttccttctgaaggagctgactctaatgaagttgggtgggcccagagccagattctcagagtgtgggagaaaagcctggaatggaaagcaactctgagcagtttctttcgaatgggggatgaacagagaggaatctctacctcaggcaggaatggaaggtgtcgtctgcttttgtcccactgctgttgaacgcagcccaagatctaggtgatggacacccatcatctgcaagggtttcctgagcgataaggctgaatttcccaggaagggtggcccagaagcccctggccaggtgcttttctgccgggcagggagagccagagctgactccattaaaaaaggcattccaactaggttatctcaagtgcaatttgaccaattgtaagcacgggctagattttggatggtaacaaaatggatgaaaatggtggtttgggtgggaaagcagctgggagagagagaagcagttggtcttttgacgcagattgtaggagctccgagctgcacctggctgggcgaaactcctgcacacccaaattttgaagcgcgttctctgagaggaaatacttaactgaattttatggaagaagcttctgtttggggctaattattccatgtcctattgagctgtatattctctggtaagtcctggagaacaacgacagcaacaacaaaatcccggagtgttaggg

SEQ ID NO: 2816 - DNA, 100 bp, Homo sapiens
  misc_feature (1)..(100): DMRX:155386901
ttatttttttcttgctgatttgttgcattcgttgtagattctatatactagtcctttgttggctgcataatttgcaaatattttctcccattctgtgggt

SEQ ID NO: 2817 - DNA, 2300 bp, Homo sapiens
  misc_feature (1)..(2300): DMRX:155702301
ttgtagttctccttgaagaggtccttcacatcccttgtaagttggattcctaggtattttattctctttgaagcaattgcgaatgggagttcacccatgatttggctctctgtttgtctgttgttggtgtataagaatgcttgtgatttttgtacattgattttgtatcctgagactttgctgaagttgcttatcagcttaaggagattttgggctgagacgatggggttttctagataaacaatcatgtcgtctgcaaacagggacaatttgacttcctcttttcctaattgaataccctttatttccttctcctgcctgattgccctggccagaacttccaacactatgttgaataggagcggtgagagagggcatccctgtcttgtgccagttttcaaagggaatgcttccagtttttgcccattcagtatgatattggctgtgggtttgtcatagatagctcttattattttgaaatacgtcccatcaatacctaatttattgagagtttttagcatgaagggttgttgaattttgtcaaaggctttttctgcatctattgagataatcatgtggtttttgtctttggctctgtttatatgctggattacatttattgatttgcgtatattgaaccagccttgcatcccagggatgaagcccacttgctcatggtggaaaagctttttgatgtgctgctggattcggtttgccagtattttattgaggatttttgcatcaatgttcatcaaggatattggtctaaaattctcttttttggttgtgtctctgcccggctttggtatcagaatgatgctggcctcataaaatgagttagggaggattccctctttttctattgattggaatagtttcagaaggaatggtaccagttcctccttgtacctctggtagaattcggctgtgaatccatctggtcctggactctttttggttggtaaactattgattattgccacaatttcagagcctgttattggtctattcagagattcaacttcttcctggtttagtcttgggagagtgtatgtgtcgaggaatgtatccatttcttctagattttctagtttatttgcgtagaggtgtttgtagtattctctgatggtagtttgtatttctgtgggatcggtggtgatatcccctttatcattttttattgtgtctatttgattcttctctctttttttctttattagtcttgctagcggtctatcaattttgttgatcctttcaaaaaaccagctcctggattcattgattttttgaagggttttttgtgtctctatttccttgagttctgctctgattttagttatttcttgccttctgctagcttttgaatgtgtttgctcttgcttttctagttcttttaattgtgatgttagggtgtcaattttggatctttcctgctttctcttgtaggcatttagtgcaataaatttccctctacacactgctttgaatgtgtcccagagattctggtatgtggtgtctttgttctcgttggggaaacccttaatctcataattgaacagatattgttctggtcgaccattctccatgatagacacaaattctctataaaaatttgaagcctgtggtggttcactgatggtaaccatagcagcaatatatctcaaattgagcctaactactaactgtaataatgcaaaccctcgcactaaaggcctactagaaggaaaggcgtgtgcatttcaaggcataaaatctatttaccttggtctctatttcctacccaacttattcaactttccacaaaatattatgaggcatgtgaaaaggcaaaaaaaagaatcaacacattcccaaagatacaagaaatattcaaaatcaaaattagatacgacacaaatttggaaactctctgacaggtaacttaaaataactatgagtaattagttaaatgttccaccagaaaaagtggacaacacacaagatagatgggtaatttctgcagagagatcaaaactataataaagaatcaaatataaatgctagaaataaaaaacaaaataacggagatgaagaatgcctttgaggggcccaacagaactgacacctctgaggacaaaatccatagaccttaaaatatattaaattgaaacaaaaatttagaccaataaattgattacattgagacaaaaaaagaatgaggaaaagaaaacattcaagagctgtgtgacaatatcaaatgttctaacattcatgtaattagaatcaccaaagaaaaagagagaaagaatggggcagaaaaa

SEQ ID NO: 2818 - DNA, 1200 bp, Homo sapiens
  misc_feature (1)..(1200): DMRY:4436601
aaatctgccctgatctttgtcatttcttttctttttctaactttgagtttggtattttcttgttttccaagtttgttgagatgcaatattaggttgtaaacttgtgatctttctactgtttgacgtaggcatttaattctataaactttccccttaatactacttttgatgtattccagagatttgggtatgtgtgtttccattttcatgtgtttaaaaaagtttaatttacagcttaattttttatttactcaaggatgactcaggagcatgttggttaatttctatgcatttgtatagtttccaaagattctctcagtattgatttatatgtagggagatgccctgaaactattgctacagaataaaagatgaaatgctcctgattactgtaaatacaaaattgcacacaggattgtgtaaagacaacgccaagttggactgccagaatgagccaacagcacgtgatgtgcttccctctgcagagagcctatgaatgaatgtgcagtcagggaggtttcacatcaccaagattcctatcccagaaaagcagatgttcatagctctgggaatggaatgcaaaccttgtggagagactataaacagacgcatggggggcgcctgtccatatggataagatagggctataaatgccctcatcttgccacagctcttctaggcctctttagggttaaggcatactcccttctgagaatttctggtctaaccggttgtctagcttcatgtcctatttctacggattgtttgtaaccagcttttgctgcaactgttactgctgattaatatcttgttaatcataggttatggaaagattgtgtttctgttttaaggctctgttagaaattactgacgcacacactatattgtaattcttatctctgtatactgtacttctgcatacaaatgttatgttaaagaatttcttcatccccatgtaaccagctcacctcataatcaaataaccctaaatccctcactaacctacccctgccctcactaaacttaataataaatgctggtatatccagtgcattgttggcaccacgggaccagaaggtggtgacccccctggacccagctttcactatcttgtgtgtgtctattatttctcaacctgccgatccgcctgggaacaaagagagagccccgttgcattgtgggctgctggccagatcccac

SEQ ID NO: 2819 - DNA, 3600 bp, Homo sapiens
  misc_feature (1)..(3600): DMRY:9380101
ttgagaggaagacagagagtgacagaatccaggacgttcatggcattgggctgaaaaggcacgttagagactgcactgcaaagcgggtgatagctgtggagtcttaagcccagtgaagaatcgtccatttccagaatcaatgagaagtaaagctgaaaatcattcagttcagtctgtggcacttgattccacggctgtcaaccccaccggcagtcatcccgccaaccccatgagattgggctccctgaatgtgcgtcctggtcatccttgccccaaaccacaaaggactgtttagattgatggatttccttaagctgttgccccatcagacttgtgtgtgcttttagggcccagtgcatcttgttagctgactcccctcacagacaatactgggaatggggcagggattgcgcagaacagtttgtaacacgtggtaggaggaagtttaagggatcacaaatggggaagggatatccttttctcagcgggccccacaattgaaacatttcaaagtatggctcagagaaaatgcgttttaacatgagtttgtgtttctctaggggactcccagttgttgagttgaatatgatggagcatcagattttacctaatacagcagaactcctaaaaagttacagccatatgcaggacggcagtactcagcatggtcttatgcacaggaactaaaggaaaaagagatcgagtcacaaaaattcaggaagagggggtaaatgtggattgtatggaatgaaaaataaacattctcaaggatgtgtgactctgtgtctgtgtgtgtgtgtgtgtctttgtgtttgtgtgtgtgtgtgtgtgtgtgtgtatgtttatccactttattcgggtgtcataatgaattgatcaatccacgtgctttattctcttcatggaaataaccagtctgcgttggagctgggcctctaaagttgtagagtgaatgggtgtgggatgtgttgggattcttcctacaggacagagtgggagaggtaaaagcaaaagacagcttagttggaggctgacttcgtcctgtggaagcagagatagttcaaggaaaggggttactgggtttccagggcccagtttgctgggacctccaaaatccttcattttgggtatcatcatacacagtagctaagcacaggatgatggaaatcttaaagttcgctttcgtgttgaatccacatgttcttttaaaggtgaatgcatgatccttttctgggacaatcagcctctcaggacttctgaaacatcaacgtgagaagaaatgggcatgtaaggtgtatggagggactgtgggaaaggtgacagaggcatgtgggaaggcattcaggatacgcttttggcatagatgactaagggaaaacagaaacttacagaagtgaggggaaagggggtggattagtggaatataagattgttggagaatccatccatggactctcttgtcacttgatgacccaggatatggacactcttgttgatgtttacatctttagttgttttaagcttttctccaagattctgtgttaggtgaggagccaataacgtatgtagctaacaacagtacgagtgcattttgtgctcttgcaaagtctagtgaggctctattctccctcgtgattggcactgcagattgtatctggagcccagggcccctaaattttctgtggcctcttcagcatagtttgcctaaggtttagaacgtaaagcgaatatagttgcggaatatgttttgcaagcctcacacaggaggacaaaacatacagctttcattcgcgagtgggaggctgcttcccaggaacacgtgtgtctgcacaagacaaggggttgcctctgtcaaggatggggcaggaggatttcagtgtcggaggcagaactttctttcctgttcccagatgaaacagttccaacacgagcatccatgttgaccacacgctactagagtgctaacattgctgtcccgtatagactctggtcagcacagcttctgtgagaagagctatgttgtttcagggaagagggtttgacagtcaaagttcctgaatctgttgtggtgcctgcaatatgcattctacccctcctgctcggtgtcaaagcagttgagctttgaaaatctatcgcccggttttgtccctgctcctatgcagacctctgaagctctggagcgggagtcttgtcctcctctgactaccgtccccctgacccacaaacacaggagaaacaggtgttctaagcaaattattctgaaaacagtcggaaccctttggccccctcaagctgccctctatcctactgtgtgcatgtcaaagacactgtggtccagtacggtatccctatagcggcaatggggcaacagattggtgtgtgcactctgggcaactcagattaggaaacgtctggggacttgcctataacgaggtcgtcttaaaacgtgttgccccaaatttaaggcataggaaaatgttgaggaaagggtcttgcaatgatttttctaggaggtaaatagataagaaaatgaccgtaaatagatgccagggctagttttggagctagcctgttttaaagtggtggtaggggaggaggtttttccaaggcaggtagcaaaccaggaactgtctacgatggatgggcgtgccatgggttggtggctcagccatattgccaccccacggagtggatgcagcagactgggcttcttccttgaatcctacgtgcaattcagtctagtgatttcacatgagatcccttcttctggtattatcacagatcgtgctgaattatacaggctgtgtaatgcttcttccactgaatatccgtacacgtgggccacagatgctaagggcactgacaaatttgcaccgtgcctcagtaactcggaagcacatctgtgatttgtaccgacagggacttggtgtcttttcgtgtttaaagtagcacgtgtgtgtttgtggttgcgtatgtttatttctctgtgcgggtttgtatattttctctgactccacctatgtctccgtggttccgatatttttccacactccctgcggcaatttgcacatgcctatctctacaaccattgtagactttgtatctgtgtctttgaacatctgtcactctctctcccttccttttttcttttccttcctttacacccctcctttcatccttcccttgcttccccaccacactctctccatctgtatcgtctatgtttctattctctatctgggtttactttctaattctgaattcaagggcattgaattgaaaagaagcactcttcgtacttttatgtgttttaactcatttggggaatttggcgtggtattatttacagggttctctctgccctttctcattgttctccccagccggggctgttattatgtgaaagctggtttccttcatcacatcgcgtaggctctaatgatgtttcgtttattttgattctcctcacactacatagttttaatttacctaatgtgactgtttttttgtttgttttccgagaatgggtcttactctgtcttctaggttggacagcagccccacgatctcagcccactgcagcccaggcaccacacaccc

SEQ ID NO: 2820 - DNA, 400 bp, Homo sapiens
  misc_feature (1)..(400): DMRY:10036801
ctcacaggcgagaatagcccctcaaaggacccttcataaacagcagaaagttgaaggacatgtttcagtgggaaagtgcctggaggaaggggagtctgcatgcccatgacagccttggaactacccctgctccccgtgcctgtgtccagcaggctcaccccagaaacacaaggtgctcaagactcgggttcaccgcacggggctgctgtcctctgcaaggcaggcaccatctccccggacacgatttcttgcctctgccggtgctgcacccaaagatatttaggccctgagtatatataacctcagttgaaaccactggagccccatggggagagccaggcacaaccctgcagccacttctacccacagcggttccctcaggtggacacgcccacctctc

SEQ ID NO: 2821 - DNA, 32753 bp, Homo sapiens
  misc_feature (1)..(32753): DMRY:11559901
atcgaatggaatggaattgaatggaatggactcgaatggaatgtactcaaatggattagaatagaatggaatggaactaaacgtaatgaactcgaatggaatggacacaaatagaatggaagagaaaggaatggtattgaatggaatttattcgaatagagtgggattgaatggaatgcaacagtgtggcatggaatcaaatggaatggaatcgaatggaatggacccgagtggaatggactcacatagagcagcctcgaatgtaatggatgacaatgtattagattcgaaaggactgaaatcgaatggaatgtaatcaagtagaacggaattgaatgcatggaatggcatagaaagtaacgcaatggaatggaatagactggaatggaatggaatcggatggaatgtaatgaaatgtaatggaaggaatgccatggaatggaatggaatggaatgcaatgggacggtgtataatggagtgcaatggatttcagtggaatgtagtcaaaaggaaagaaatagaatggaattcaatataatggaatggcatccaatggcaaggaatggagcagactccaatggaaacgacatgaaaggaatataataaaatggaatggcattgaacgaaatggaatgcaatggagttaaaaggtaaaatatcgaatggaaaagaattgaatggactcgaaaggaatataatggaatggaatggactcgaatggaatgtactagagttgaatggaatcgaatggaatggaaaacaatggaaaggaaaggaagggaattgaaaggaaaggaatagaatggaatggaatcggatggaacggaattgaatggaatggaaactaaaggaatagaatagaaaggaatcgcattgaatggaatggaatagaatggaatcagatggaacagaaaggaatggaatagaatcgaatggaatggcatcgaatggatggaatgaaatgtaatggaatggaatagaaaggaatggaatggactcgaatggaatgtcctcaaatggaatagaatagaatggaatggaagtaaatataatggactcgaatggaatgcattggaataaattggaattgagtgtattggattcgaatggaaaggaatggaatggaatggaatggaatggaatggaatggaatggattcgaatggaatggaatcgaatgtaatggagcgaattggaatgtaattgaatggagtcaaaaacagtagagataaataaagtttcatcaaatgatatcgaatggaattgaatggaatgtacgcgaatggaatggactggaatggaatggagtgacatgtaacggaatcgataggaatggaatccaatgaaatggaattgaatggaatagaaatgaatagaatggaatggagatgaatggaaagatattaaaataatggaatggaattgagtggacacgaatggaatggactggaatggaaaggactcgaatgaaatggagcgcattagaacggactggaatggaatggattggagtggaatggtctcgaatggattggaaaggaatggaatggaaaggaatagaatggaatgtaatcaaatggaacgaaatggaatggaatggattcgaccggagcagaattgaatggagtggaattgaatggaatgggatgcaatcgaatggaatggacacgaatcaaatagaatgaaatgaaatggcatagaatggaatggaatggaatggaatggaatggaatggaatgggatggaatggaatggaattaaatggaacggaatggaatggcatggaatggaatggcatggcatggaatggaatggaatggaatggaatgaaatggattggaatgggatgggcccaaaagtaatagactcaaataaaaggaactcaaatagaatgaagtggaaagaaacggtctcgaatgtaatgtattcgaatggaatgatattgaatggaatgcaatagtatggaatggtatcgaatagaatggaatagaatggaatggaatggaacggaatggagtccaattgaaccgactcaaatgcaataaattgcaatataattgattcaaatggaatggaattgaatagaatgtaaacaaatggaatggaaggcaatgcaatggaaaggaatcgaatgaaatggaataaatggaatggaatggaatggaaaggacgcgaatatattggactgttaaggaaaggtgtcaaatcgaatttattccaatagaatggaatcgaatggaatgcaatactgttgaatcgaatcgaatggaatggaattgaatggaatgggcaggaatggaatgaactggaagtgaatggacaggaacgtaatatattacaatgtaatttattcaaatggaatggaatgcaatcgaatggaatggactcgattggaatggactggagtggaatggactcaaatggaatggcaaggaatggaatggaatggaatggaaagcaaaggaatctactggaatagaatcgaacggaacagaaaggaatggaatggaatggagtggaatggactcgaatggaatgtattcgaatgtaatggacctaaaaaggaatggaatccaatggaatggaattgaatggaatcaaaaggaatagaaaggaatagagtgtaattgaatgatatcgaaaggaagggaatggaatgaactcgaatggaatgcactggaatggaatggactcgatcagaacggactggagaggaatgtacacaaatggaatggaaacgaatggaatggaatgaaatggaatggaatgaaatggaattgaaaggaacagaatcaaatggaatggaatggaatggaatggattggaatagaatggattcaaataaaagagaatcgatgggaatggtattgaatgaaagggacttgaatggaatggaaagcaatggaagatattggaatcgaatggcatcgaatgaaatggaatggaacggaatggaacggaaccgaatggaatggaatggactcaaatgtaatggacaccaatggaatcgactgaaatataatagtgtcgaaaggaatggccacgagcggaatttatttgaatagaatggaataaaatggaatacaaaaccattgaatggaatcgaatggaatggaatcgaatggaatggaatcaaatggaatggaacggaattcaatataatggagtagaatggaatgcattggaaaggagcagactggaatcaagtggaatggaatcgagtggaatggaatcaatgggaacaaaatcgaattgaatggacttgaatggaattgactcgaaaggaatggactggaacaaaaaggaatcaaatggacaggaatgggatggaatggacacgaatggaatggagtcaaatgcaaacgcatcgaatggaatggattcaaatggaatgcaatggaatggaagagaaaggaagagaatggaattgagagtaatggaaagatatcgattggaatgaaatggaatggaaaggaattgaatggaaaggaagggagtggaaagaaatggattggaatggaatggtctccaatggaatggactggagtggaatggaatctaatggaatgaaaagaatggaacggaatggaacggaaaggaatagaatgttatggaatccgattggacagaatggaatggaatggagtttcatgaaatggagtcgaatagagtggcatcaaaaggaatggaatggaatggagtggactcaaaaggaatggactcgaaaggaatggagtccaaccaaattgaatcaaatggattggagtcgaacagaatggaatggaatggaatgaactcgactggagtagagaggaatgtaaaggaatagaatggaatgtaatcaaatggattgcaagtgaatggaatcaaaaataatagaaaggaatggagtgtaaagggatgatattgaatataatggaatggaatggaatttaatggaatggagtcgaaggaatggacaggaatgtaatggactccaatggaatggtatggatgaaaatggatttgaacagattggaatcgaacggaatggaatgcaatggaatggaatggactcgaatggagaagagacaaatggaatggaaacgaattcaatggaattgaaaagaataggatggaatggcgtgtaatggtaagatactaaatggaatggaattgaatggaatggaatggacccaaatgtaatgcactcgaaaggaatatactcaaatagaatggaatcgaaaggaaaggtctcaaatggaatttattcaatacaatggaatcgaatggaatgcaatagaatggaatggaatcgaatgtaatggaatcaaatagaatggaccagaatggaatggactgccatagaacggactgcagtgtaatggattgaattctaattcattcaaatggaatggaattgaatggaatggaatccaatggaatggataggattgtactggaatggaatagcatggaatgcaacggagtggaatggagttgaatgaagtggaatggaatcgattggaatggaatcaaatggaatggacgggaatggaatggactggaagagaacagactcgaatttaatggattgcaatgtaattgattcaaatggaatggaatcgaatggaatgtaataaaattgaagggatttgagttcaatgcaatggaatagaatggaatgcaaaggacaggaaaggtacggagtgaaatcgagtgtaatggaatcgaatggaatgaaatggaatggaatagactcgaaagaaatggacgaggcacaaaacggaatcgaactgattggaatcgaacggaacggagtggaatggaatggtctccattggatcggaggagaacggactggaatggaatggaatgaaatggaatggaacagaatagaatggaatggaatggaatggaatggaatggaaggtaatggaaagatatcgaacggattggaaaggaatggaatggaccctaatggaatggaatggaattcaacagaaactaatggaatggactggagtgaaatggagtcgaatgtaattgactggagtggaatggactcgaaaggaatggactcgaatagaatggactggaatggattgtactcgaatggagtggaaaggaatacaatggattccaccagattggaatggaacagaatgtaatggaatggaatggaatgcaatggaatagctccaatggaatggagtcgaatgcagtggaacagaaaggaaaggaattgaatggaattgaaagtaatagaacaaaatggagtgcaaaggaaagatattgaatggaatggatcgaaaagaaatcgaatggaatggacaggaatggaatggaatagaatggaatagactggcgtgcaatgaaaacgaatggaatggaaacgaatttaatgcaatggaaaggaatggagtagaataaatactatggaatggaatggaggcgaaaggaaaagaatggattggaatgtcaccgaatggaaagatatggaatggaaaggaatggatacgaatggaatggaatagaaaggaacggaaaggtaaagaatggaatggaatcggatagaatggaatgcaatgtaatggagtcgaatggaaaataatcgtgtagaatgatatcgaatggaatggaatggaatggaatggactcgaatggaatgtactcaaatggattagaatagaatggaatggaactaaacgtaatgaactcgaatggaatggacacaaatagaatggaagagaaaggaatggtattgaatggaatttattcgaatagagtggaattcaatagaatgcaacagtgtggcatggaatcaaatggaatggaatcgaatggaatggacccgagtggaatggactcacatagaacagcctcgaatgtaatggatgacaatgtattagattcgaaaggactgaaatcgaatggaatgtaatcaagtagaacggaattgaatgcatggaatggcatagaaagtaacgcaatggaatggaatagactggaatggaatggaatcggatggaatgtaatgaaatgtaatggaaggaatgccatggaatggaatggaatggaatgcaatgggacggtgtataatggagtgcaatggatttcagtggaatgtagtcaaaaggaaagaaatagaatggaattcaatataatggaatggcatccaatggcaaggaatggagcagactccaatggaaacgacatgaaaggaatataataaaatggaatggcattgaacgaaatggaatgtaatggagttaaaaggtaaaatatcgaatggaaaagaattgaatggactcgaaaggaatataatggaatggaatggactcgaatggaatgtactagagttgaatggaatcgaatggaatggaaaacaatggaaaggaaaggaagggaattgaaaggaaaggaatagaatggaatggaatcggatggaacggaattgaatggaatggaaactaaaggaatagaatagaaaggaatcgcattgaatggaatggaatagaatggaatcagatggaacagaaaggaatggaatagaatcgaatggaatggcatcgaatggatggaatgaaatgtaatggaatggaatagaaaggaatggaatggactcgaatggaatgtcctcaaatggaatagaatagaatggaatggaagtaaatataatggactcgaatggaatgcattggaataaattggaattgagtgtattggattcgaatggaaaggaatggaatggaatggaatggaatggaatggaatggattcgaatggaatggaatcgaatggaatggaacgaattggaatgtaattgaatggagtcaaaaacagtagaaagaaataaagtttcatcgaaagatatcgaatggaattgaatggaatgtacgcgaatggaatggactgtaatggaatggagtgacatgtaacggaatcgaaaggaatggaatccaatgaaatggaattgaatggaatagaaatgaatagaatggaatggagattaacggaaagatattaaaataatggaatggaattgagtggacacgaatggaatggactggaatggaaaggactcaaatgaaaacgagcgcattagaatggactcgaatggaatggattggagtggaatggtctcgaatggattggaaaggaatggaatggaaaggaatagaatggaatgtaatcaaatggaacgaaatggaatggaatggattcgactggagcagaattgaatggagtggatttgaatggaatggaatgcaatcgaatggaatggacacgaatcgaatagaatgaaatgaaatggcatagaatggaatggaatggaatggaatggaatggaatggaatggaatggaatggaacggaattgaatgtcatggaatggaatggcatggcatggaatggaatggaatggaatggaatgaaatggattggaatgggatgggcccaaaagtaatagactcaaataaaagggactcaaagagaatgaagtggaaagaaacggtctcgaatgtaatttattcgaatagaatgatattgaatggaatgcaatagtatggaatggtatcgaatagaatggaatagaatggaatggaacggaatggagtgcaattgaacggactcaaatgcaataaattgcaatataattgattcaaatggaatggaatcgaatagaatgtaaacaaatggaatggaaggcaatgcaatggaaaggaatcgaatgaaatggaataaatggaatggaatggaatggaaaggaggcgaatatattggactgttaaggaaaggtgtcaaatcgaatttattccaatagaatggaatcgaatggaatgcaatactattgaatcgaatcgaatggaatggaattgaatggaatggacaggaatggaatgaactggaagtgaatggacaggaacgtaatatattgcaatgtaatttattcaaatggaatggaatgcaatcgaatggaatggactcgattggaatggactggagtggaatggattcaaatggaatggcaaggaatggaatggaatggaatggaaagcaaaggaatctactggaatagaatcgaacggaacagaaaggaatggaatggaatggagtggaatggactcgaatggaatgtattcgaatgtaatggacctaaaaaggaatggaatccaatggaatggaattgaatggaatcaaaaggaatagaaaggcatcgagtgtaattgaatgatatcgaaaggaagggaatggaatgaactcgaatggaatgcactggaatggaatggactcgatcagaacggactggagaggaatgtacacaaatggaatggaaacgaatggaatggaatgaaatggaatggaatgaaatggaattgaaaggaagggaatcaaatggaatggaatggaatggattggaatagaatggattcaaataaaatagaatcgatgggaatggtattgaatgaaagggacttgaatggaatggaaagcaatggaagatattggaatcgaatggcatcgaatgaaatggaatggaacggaatggaacggaaccgaatggaatggaatggactcaaatgtaatggacaccaatggaatcgactgaaatataatagtgtcgaaaggaatggcctcgagcggaatttatttgaatagaatggaatcaaatggaatacaataccattgaatggaatcgaatggaatggaatcgaatggaatggaatcaaatggaatggaacggaattcaatataatggagtagaatggaatgcattggaaaggagcagagtggaatcaagtggaatggaatcgagtggaatggaatcgagtggaatggaatcaatgggaacaaaatcgaattgaatggacttgaatggaattgactcgaaaggaattgactcgaaagaaatggactggaacaaaaaggaatcaaatggacaggaatgggatggaatggacacgaatggaatggagtcaaatgcaaacgcatcgaatggaatggattgaaatggaatgcaatggaatggaacagaaaggaagagaatggaattgagagtaatggaaagatatcgattggaatgaaatggaatggaaaggaattgaatggaaaggaatggagtggaaagaaatggattggaatggaatggtctccaatggaatggactggagtggaatggaatcgaatggaatgaaaagaatggaacggaatggaatggaaaggaatagaatattatggaatccgattggacagaatggaatggaatggagtttcatgaaatggagtcgaatagagtgtcatcaaaaggaatggaatggaatggagtggactcaaaaggaatggactcgaaaggaatggagtccaaccaaattgaatcaaatggattggagtcgaacagaatggaatggaatgaaatgtactcgactggagtagagaggaatgtaaaggaatagaatggaatgtaatcaaatggattgcaagtgaatggaatcaaaaataatagaaaggaatggagtgtaaagggatgatattgaatgtaatggaatggaatggaatttaatggaatggagacgaaggaatggacaggaatgtaatggactccaatggaatggaatggatcaaaatggatttgaacagattggaatcgaacggaatggaatgcaacggcatggaatggactcgaatggagaagagacaaatggaatggaaacgaattcaatggaattgaaaagaataggatggaatggcgtgtaatggtaagatactaaatggaatggaattgaatggaatggaatggacccaaatgtaatgcactcgaaaggaatatactcaaatagaacggaatcgaaaggaaaggtctcaaatggaatttattcaatacaatggaatcgaatggaatgcaatagaatggaatggaatcgaatgtaatggaatcaaatagaatggaccagtatggaacggactgccatagaacggactgcagtgtaatggattgaattctaattcattcaaatggaatggaattgaatggaatggaatccaatggaatggataggattgtactggaatggaatagcatggaatgcaacggagtggaatggagttgaatgaagtggaatggaatcgatcggaatggaatcaaatggaatggacgggaatggaatggactggaagagaacagactcgaatttaatggattgcaatgtaattgattcaaagggaatggaatcgaatggaatgtaataaaattgaagggatttgagttcaatgcaatggaataaaatggaatgcaaaggataggaaaggtacggagtgaaatcgagtgtaatggaatcgaatggaatgaaatggaatggaatggactcaaaagaaatggacgagggacaaaacggaatcgaactgattggaatcgaacggaacggaatggaatggaatggtctccattggatcggagtagaacggactggaatggaatggaatgaaatggaatggaaaggaatagaatggaatggaatggaatggaaggtaatggaaagatatcgaacggattggaaaggaatggaatggaccctaatggaatggaatggaattcaacagaaacgaatggaatggactggagtgaaatggagtcgaatgtaattgactggagtggaatggactcgaaaggaatggactcgaatagaatggactggaatggattgtactcgaatggagtggaaaggaataaaatggattgcaccagattggaatggaacagaatgtaatggaatggaatggaatgcaatggaatggctccaatggaatggagtcgaatgcaatggaacagaaaggaaaggaattgaatggaattgaaagtaatagaacaaaatggagtgcaaaggaaagatattgaatggaatgaatcgaaaagaaatcgaatggaatggacaagaatggaatggaatagaatggaatagactggcgtgcaatgaaaacgaatggaacggaaacgaatggaatgcaatggaaaggaatggagtagaataaatactatggaatggaatggaggcgaaaggaaaagaatggattggaatgtcaccgaatggaaagatatggaatggaaaggaatggatacgaatggaatggaatagaaaggaacggaaaggtaaagaatggaatggaatcggatagaatggaatgcaatgtaatggagtcgaatggaaaataatcgtgtagaatgatatcgaatggaatggaatggaatggaatggactcgaatggaatgtactcaaatggattagaatagaatggaatggaactaaacgtaatgaactcgaatggaatggacacaaatagaatggaagagaagggaatggtattgaatggaatttattcgaaaagagtggaattcaatggaatgcagcagtgtggcatggaatcaaatggaatggaatcgaatggaatggacccgagtggaatggactcacatagaacagcctcgaatgtaatggatgacaatgtattagattcgaaaggactgaaatcgaatggaatgtaatcaagtagaacggaattgaatgcatggaatggcatagaaagtaacgcaatggaatggaatagactggaatggaatggaatcggatggaatgtaatgaaatgtaatggaaggaatgccatggaatggaatggaatggaatgcaatgggacggtgtataatggagtgcaatggatttcagtggaatgtagtcaaaaggaaagaaatagaatggaattcaatataatggaatggcatccaatggcaaggaatggagcggactccaatggaaacgacatgaaaggaatataataaaatggaatggcattgaacgaaatggaatgcaatggagttaaaaggtaaaatatcgaatggaaaagaattgaatggactcgaaaggaatataatggaatggaatggactcgaatggaatgtactagagttgaatggaatcgaatggaatggaaaacaatggaaaggaaaggaagggaattgaaaggaaaggaatagaatggaatggaatcggatggaacggaattgaatggaatggaaactaaaggaatagaatagaaaggaatcgcattgaatggaatggaatagaatggaatcagatggaacagaaaggaatggaatagaatcgaatggaatggcatcgaatggatggaatggaatgtaatggaatggaatagaaaggaatggaatggactcgaatggaatgtactcaaatggaatagaatagaatggaatggaagtaaatataatggactcgaatggaatgcattggaataaattggaattgagtgtattggattcgaatggaaaggaatggaatggaatggaatggaatggaatggaatggaatggattcgaatggaatggaatcgaatggaatggaacgaattggaatgtaattgaatggagtcaaaaacagtagaaagaaataaagtttcatcgaaagatatcgaatggaattgaatggaatgtacgcgaatggaatggactggaatggaatggagtgacatgtaacggaatcgaaaggaatggaatccaatgaaatggaattgaatggaatagaaatgaatagaatggaatggagattaacggaaagatattaaaataatggaatggaattgagtggacacgaatggaatggactggaatggaaaggactcaaatgaaaacgagcgcaatagaatggactcgaatggaatggattggagtggaatggtctcgaatggattggaaaggaatggaatggaaaggaatagaatggaatgtaatcaaatggaacgaaatggaatggaatggattcgactggagcagaattgaatggagtggatttgaatggaatggaatgcaatcgaatggaatggacacgaatcgaatagaatgaaatgtaatggcatagaatggaatggaatggaatggaatggaatggaatggaatggaatggaacggaattgaatgtcatggaatggaatggcatggcatggaatggaatggaatggaatggaatgaaatggattggaatgggatgggcccaaaagtaatagactcaaataaaagggactcaaagagaatgaagtggaaagaaacggtctcgaatgtaatttattcgaatagaatgatattgaatggaatgcaatagtatggaatggtatcgaatagaatggaatagaatggaatggaatggaacggaatggagtgcaattgaacggactcaaatgaaataaattgcaatataattgattcaaatggaatggaatcgaatagaatgtaaacaaatggaatggaaggcaatgcaatggaaaggaatcgaatgaaatggaataaatggaatggaatggaatggaaaggacgcgaatatattggactgttaaggaaaggtgtcaaatcgaatttattccaatagaatggaatcgaatggaatgcaatactattgaatcgaatcgaatggaatggaattgaatggaatggacaggaatggaatgaactggaagtgaatggacaggaacgtaatatattgcaatgtaatttattcaaatggaatggaatgcaatcgaatggaatggactcgattggaatggactggagtggaatggattcaaatggaatggcaaggaatggaatggaatggaatggaaagcaaaggaatctactggaatagaatcgaacggaacagaaaggaatggaatggaatggagtggaatggactcgaatggaatgtattcgaatgtaatggacctaaaaaggaatggaatccaatggaatggaattgaatggaatcaaaaggaatagaaaggcatcgagtgtaattgaatgatatcgaaaggaagggaatggaatgaactcgaatggaatgcactggaatggaatggactcgatcagaacggactggagaggaatgtacacaaatggaatggaaacgaatggaatggaatgaaatggaatggaatgaaatggaattgaaaggaagggaatcaaatggaatggaatggaatggattggaatagaatggattcaaataaaatagaatcgatgggaatggtattgaatgaaagggacttgaatggaatggaaagcaatggaagatattggaatcgaatggcatcgaatgaaatggaatggaacggaatggaacggaaccgaatggaatggaatggactcaaatgtaatggacaccaatggaatcgactgaaatataatagtgtcgaaaggaatggcctcgagcggaatttatttgaatagaatggaatcaaatggaatacaataccattgaatggaatcgaatggaatggaatcgaatggaatggaatcaaatggaatggaacggaattcaatataatggagtagaatggaatgcattggaaaggagcagagtggaatcaagtggaatggaatcgagtggaatggaatcgagtggaatggaatcaatgggaacaaaatcgaattgaatggacttgaatggaattgactcgaaaggaattgactcgaaagaaatggactggaacaaaaaggaatcaaatggacaggaatgggatggaatggacacgaatggaatggagtcaaatgcaaacgcatcgaatggaatggattgaaatggaatgcaatggaatggaacagaaaggaagagaatggaattgagagtaatggaaagatatcgattggaatgaaatggaatggaaaggaattgaatggaaaggaatggagtggaaagaaatggattggaatggaatggtctccaatggaatggactggagtggaatggaatcgaatggaatgaaaagaatggaacggaatggaatggaaaggaatagaatgttatggaatccgattggacagaatggaatggaatggagtttcatgaaatggagtcgaatagagtgtcatcaaaaggaatggaatggaatggagtggactcaaaaggaatggactcgaaaggaatggagtccaaccaaattgaatcaaatggattggagtcgaacagaatggaatggaatgaaatgtactcgactggagtagagaggaatgtaaaggaatagaatggaatgtaatcaaatggattgcaagtgaatggaatcaaaaataatagaaaggaatggagtgtaaagggatgatattgaatataatggaatggaatggaatttaatggaatggagacgaaggaatggacaggaatgtaatggactccaatggaatggaatggatcaaaatggatttgaacagattggaatcgaacggaatggaatgcaacggcatggaatggactcgaatggagaagagacaaatggaatggaaacgaattcaatggaattgaaaagaataggatggaatggcgtgtaatggtaagatactaaatggaatggaattgaatggaatggaatggacccaaatgtaatgcactcgaaaggaatatactcaaatagaacggaatcgaaaggaaaggtctcaaatggaatttattcaatacaatggaatcgaatggaatgcaatagaatggaatggaatcgaatgtaatggaatcaaatagaatggaccagtatggaatggactgccatagaacggactgcagtgtaatggattgaattctaattcattcaaatggaatggaattgaatggaatggaatccaatggaatggataggattgtactggaatggaatagcatggaatgcaacggagtggaatggagttgaatgaagtggaatggaatcgatcggaatggaatcaaatggaatggacgggaatggaatggactggaagagaacagactcgaatttaatggattgcaatgtaattgattcaaagggaatggaatcgaatggaatgtaataaaattgaagggatttgagttcaatgcaatggaataaaatggaatgcaaaggataggaaaggtacggagtgaaatcgagtgtaatggaatcgaatggaatgaaatggaatggaatggactcaaaagaaatggacgagggacaaaacggaatcgaactgattggaatcgaacggaacggaatggaatggaatggtctccattggatcggagtagaacggactggaatggaatggaatgaaatggaatggaaaggaatagaatggaatggaatggaatggaatggaatggaaggtaatggaaagatatcgaacggattggaaaggaatggaatggaccctaatggaatggaatggaattcaacagaaacgaatggaatggactggagtgaaatggagtcgaatgtaattgactggagtggaatggactcgaaaggaatggactcgaatagaatggactggaatggattgtactcgaatggagtggaaaggaataaaatggattgcaccagattggaatggaacagaatgtaatggaatggaatggaatgcaatggaatggctccaatggaatggagtcgaatgcaatggaacagaaaggaaaggaattgaatggaattgaaagtaatagaacaaaatggagtgcaaaggaaagatattgaatggaatgaatcgaaaagaaatcgaatggaatggacaagaatggaatggaatagaatggaatagactggcgtgcaatgaaaacgaatggaacggaaacgaatggaatccaatggaaaggaatggagtagaataaatactatggaatggaatggaggcgaaaggaaaagaatggattggaatgtcaccgaatggaaagatatggaatggaaaggaatggatacgaatggaatggaatagaaaggaacggaaaggtaaagaatggaatggaatcggatagaatggaatgcaatgtaatggagtcgaatggaaaataatcgtgtagaatgatatcgaatggaatggaatggaatggaatggactcgaatggaatgtactcaaatggattagaatagaatggaatggaactaaacgtaatgaactcgaatggaatggacacaaatagaatggaagagaagggaatggtattgaatggaatttattcgaaaagagtggaattcaatggaatgcagcagtgtggcatggaatcaaatggaatggaatcgaatggaatggacccgagtggaatggactcacatagaacagcctcgaatgtaatggatgacaatgtattagattcgaaaggactgaaatcgaatggaatgtaatcaagtagaacggaattgaatgcatggaatggcatagaaagtaacgcaatggaatggaatagactggaatggaatggaatcggatggaatgtaatgaaatgtaatggaaggaatgccatggaatggaatggaatggaatgcaatgggacggtgtataatggagtgcaatggatttcagtggaatgtagtcaaaaggaaagaaatagaatggaattcaatataatggaatggcatccaatggcaaggaatggagcggactccaatggaaacgacatgaaaggaatataataaaatggaatggcattgaacgaaatggaatgcaatggagttaaaaggtaaaatatcgaatggaaaagaattgaatggactcgaaaggaatataatggaatggaatggactcgaatggaatgtactagagttgaatggaatcgaatggaatggaaaacaatggaaaggaaaggaagggaattgaaaggaaaggaatagaatggaatggaatcggatggaacggaattgaatggaatggaaactaaaggaatagaatagaaaggaatcgcattgaatggaatggaatagaatggaatcagatggaacagaaaggaatggaatagaatcgaatggaatggcatcgaatggatggaatggaatgtaatggaatggaatagaaaggaatggaatggactcgaatggaatgtactcaaatggaatagaatagaatggaatggaagtaaatataatggactcgaatggaatgcattggaataaattggaattgagtgtattggattcgaatggaaaggaatggaatggaatggaatggaatggaatggaatggaatggattcgaatggaatggaatcgaatggaatggaacgaattggaatgtaattgaatggagtcaaaaacagtagaaagaaataaagtttcatcgaaagatatcgaatggaattgaatggaatgtacgcgaatggaatggactggaatggaatggagtgacatgtaacggaatcgaaaggaatggaatccaatgaaatggaattgaatggaatagaaatgaatagaatggaatggagattaacggaaagatattaaaataatggaatggaattgagtggacacgaatggaatggactggaatggaaaggactcaaatgaaaacgagcgcaatagaatggactcgaatggaatggattggagtggaatggtctcgaatggattggaaaggaatggaatggaaaggaatagaatggaatgtaatcaaatggaacgaaatggaatggaatggattcgactggagcagaattgaatggagtggatttgaatggaatggaatgcaatcgaatggaatggacacgaatcgaatagaatgaaatgtaatggcatagaatggaatggaatggaatggaatggaatggaatggaatggaacggaattgaatgtcatggaatggaatggcatggcatggaatggaatggaatggaatggaatgaaatggattggaatgggatgggcccaaaagtaatagactcaaataaaagggactcaaagagaatgaagtggaaagaaacggtctcgaatgtaatttattcgaatagaatgatattgaatggaatgcaatagtatggaatggtatcgaatagaatggaatagaatggaatggaatggaacggaatggagtgcaattgaacggactcaaatgcaataaattgcaatataattgattcaaatggaatggaatcgaatagaatgtaaacaaatggaatggaaggcaatgcaatggaaaggaatcgaatgaaatggaataaatggaatggaatggaatggaaaggacgcgaatatattggactgttaaggaaaggtgtcaaatcgattttattccaatagaatggaatcgaatggaatgcaatactattgaatcgaatcgaatggaatggaattgaatggaatggacaggaatggaatgaactggaagtgaatggacaggaacgtaatatattgcaatgtaatttattcaaatggaatggaatgcaatcgaatggaatggactcgattggaatggactggagtggaatggattcaaatggaatggcaaggaatggaatggaatggaatggaaagcaaaggaatctactggaatagaatcgaacggaacagaaaggaatggaatggaatggagtggaatggactcgaatggaatgtattcgaatgtaatggacctaaaaaggaatggaatccaatggaatggaattgaatggaatcaaaaggaatagaaaggcatcgagtgtaattgaatgatatcgaaaggaagggaatggaatgaactcgaatggaatgcactggaatggaatggactcgatcagaacggactggagaggaatgtacacaaatggaatggaaacgaatggaatggaatgaaatggaatggaatgaaatggaattgaaaggaagggaatcaaatggaatggaatggaatggattggaatagaatggattcaaataaaatagaatcgatgggaatggtattgaatgaaagggacttgaatggaatggaaagcaatggaagatattggaatcgaatggcatcgaatgaaatggaatggaacggaatggaacggaaccgaatggaatggaatggactcaaatgtaatggacaccaatggaatcgactgaaataaatagtgtcgaaaggaatggcctcgagcggaatttatttgaatagaatggaatcaaatggaatacaataccattgaatggaatcgaatggaatggaatcgaatggaatggaatcaaatggaatggaacggaattcaatataatggagtagaatggaatgcattggaaaggagcagagtggaatcaagtggaatggaatcgagtggaatggaatcgagtggaatggaatcaatgggaacaaaatcgaattgaatggacttgaatggaattgactcgaaaggaattgactcgaaagaaatggactggaacaaaaaggaatcaaatggacaggaatgggatggaatggacacgaatggaatggagtcaaatgcaaacgcatcgaatggaatggattgaaatggaatgcaatggaatggaacagaaaggaagagaatggaattgagagtaatggaaagatatcgattggaatgaaatggaatggaaatgaattgaatggaaaggaatggagtggaaagaaatggattggaatggaatggtctccaatggaatggactggagtggaatggaatcgaatggaatgaaaagaatggaacggaatggaatggaaaggaatagaatgttatggaatccgattggacagaatggaatggaatggagtttcatgaaatggagtcgaatagagtgtcatcaaaaggaatggaatggaatggagtggactcaaaaggaatggactcgaaaggaatggagtccaaccaaattgaatcaaatggattggagtcgaacagaatggaatggaatgaaatgtactcgactggagtagagaggaatgtaaaggaatagaatggaatgtaatcaaatggattgcaagtgaatggaatcaaaaataatagaaaggaatggagtgtaaagggatgatattgaatataatggaatggaatggaatttaatggaatggagacgaaggaatggacaggaatgtaatggactccaatggaatggaatggatcaaaatggatttgaacagattggaatcgaacggaatggaatgcaacggcatggaatggactcgaatggagaagagacaaatggaatggaaacgaattcaatggaattgaaaagaataggatggaatggcgtgtaatggtaagatactaaatggaatggaattgaatggaatggaatggacccaaatgtaatgcactcgaaaggaatatactcaaatagaacggaatcgaaaggaaaggtctcaaatggaatttattcaatacaatggaatcgaatggaatgcaatagaatggaatggaatcgaatgtaatggaatcaaatagaatggaccagtatggaatggactgccatagaacggactgcagtgtaatggattgaattctaattcattcaaatggaatggaattgaatggaatggaatccaatggaatggataggattgtactggaatggaatagcatggaatgcaacggagtggaatggagttgaatgaagtggaatggaatcgatcggaatggaatcaaatggaatggacgggaatggaatggactggaagagaacagactcgaatttaatggattgcaatgtaattgattcaaagggaatggaatcgaatggaatgtaataaaattgaagggatttgagttcaatgcaatggaatagaatggaatgcaaaggataggaaaggtacggagtgaaatcgagtgtaatggaatcgaatggaatgaaatggaatggaatggactcaaaagaaatggacgagggacaaaacggaatcgaactgattggaatcgaacggaacggaatggaatggaatggtctccattggatcggagtagaacggactggaatggaatggaatgaaatggaatggaaaggaatagaatggaatggaatggaatggaatggaatggaaggtaatggaaagatatcgaacggattggaaaggaatggaatggaccctaatggaatggaatggaattcaacagaaacgaatggaatggactggagtgaaatggagtcgaatgtaattgactggagtggaatggactcgaaaggaatggactcgaatagaatggactggaatggattgtactcgaatggagtggaaaggaataaaatggattgcaccagattggaatggaacagaatgtaatggaatggaatggaatgcaatggaatggctccaatggaatggagtcgaatgcaatggaacagaaaggaaaggaattgaatggaattgaaagtaatagaacaaaatggagtgcaaaggaaagatattgaatggaatgaatcgaaaagaaatcgaatggaatggacaagaatggaatggaatagaatggaatagactggcgtgcaatgaaaacgaatggaacggaaacgaatggaatgcaatggaaaggaatggagtagaataaatactatggaatggaatggaggcgaaaggaaaagaatggattggaatgtcaccgaatggaaagatatggaatggaaaggaatggatacgaatggaatggaatagaaaggaacggaaaggtaaagaatggaatggaatcggatagaatggaatgcaatgtaatggagtcgaatggaaaataatcgtgtagaatgatatcgaatggaatggaatggaatggaatggactcgaatggaatgtactcaaatggattagaatagaatggaatggaactaaacgtaatgaactcgaatggaatggacacaaatagaatggaagagaagggaatggtattgaatggaatttattcgaaaagagtggaattcaatggaatgcagcagtgtggcatggaatcaaatggaatggaatcgaatggaatggacccgagtggaatggactcacatagaacagcctcgaatgtaatggatgacaatgtattagattcgaaaggactgaaatcgaatggaatgtaatcaagtagaacggaattgaatgcatggaatggcatagaaagtaacgcaatggaatggaatagactggaatggaatggaatcggatggaatgtaatgaaatgtaatggaaggaatgccatggaatggaatggaatggaatgcaatgggacggtgtataatggagtgcaatggatttcagtggaatgtagtcaaaaggaaagaaatagaatggaattcaatataatggaatggcatccaatggcaaggaatggagcggactccaatggaaacgacatgaaaggaatataataaaatggaatggcattgaacgaaatggaatgcaatggagttaaaaggtaaaatatcgaatggaaaagaattgaatggactcgaaaggaatataatggaatggaatggactcgaatggaatgtactagagttgaatggaatcgaatggaatggaaaacaatggaaaggaaaggaagggaattgaaaggaaaggaatagaatggaatggaatcggatggaacggaattgaatggaatggaaactaaaggaatagaatagaaaggaatcgcattgaatggaatggaatagaatggaatcagatggaacagaaaggaatggaatagaatcgaatggaatggcatcgaatggatggaatggaatgtaatggaatggaatagaaaggaatggaatggactcgaatggaatgtactcaaatggaatagaatagaatggaatggaagtaaatataatggactcgaatggaatgcattggaataaattggaattgagtgtattggattcgaatggaaaggaatggaatggaatggaatggaatggaatggaatggaatggattcgaatggaatggaatcgaatggaatggaacgaattggaatgtaattgaatggagtcaaaaacagtagaaagaaataaagtttcatcgaaagatatcgaatggaattgaatggaatgtacgcgaatggaatggactggaatggaatggagtgacatgtaacggaatcgaaaggaatggaatccaatgaaatggaattgaatggaatagaaatgaatagaatggaatggagattaacggaaagatattaaaataatggaatggaattgagtggacacgaatggaatggactggaatggaaaggactcaaatgaaaacgagcgcaatagaatggactcgaatggaatggattggagtggaatggtctcgaatggattggaaaggaatggaatggaaaggaatagaatggaatgtaatcaaatggaacgaaatggaatggaatggattcgactggagcagaattgaatggagtggatttgaatggaatggaatgcaatcgaatggaatggacacgaatcgaatagaatgaaatgtaatggcatagaatggaatggaatggaatggaatggaatggaatggaatggaacggaattgaatgtcatggaatggaatggcatggcatggaatggaatggaatggaatggaatgaaatggattggaatgggatgggcccaaaagtaatagactcaaataaaagggactcaaagagaatgaagtggaaagaaacggtctcgaatgtaatttattcgaatagaatgatattgaatggaatgcaatagtatggaatggtatcgaatagaatggaatagaatggaatggaatggaacggaatggagtgcaattgaacggactcaaatgcaataaattgcgatataattgattcaaatggaatggaatcgaatagaatgtaaacaaatggaatggaaggcaatgcaatggaaaggaatcgaatgaaatggaataaatggaatggaatggaatggaaaggacgcgaatatattggactgttaaggaaaggtgtcaaatcgaatttattccaatagaatggaatcgaatggaatgcaatactattgaatcgaatcgaatggaatggaattgaatggaatggacaggaatggaatgaactggaagtgaatggacaggaacgtaatatattgcaatgtaatttattcaaatggaatggaatgcaatcgaatggaatggactcgattggaatggactggagtggaatggattcaaatggaatggcaaggaatggaatggaatggaatggaaagcaaaggaatctactggaatagaatcgaacggaacagaaaggaatggaatggaatggagtggaatggactcgaatggaatgtattcgaatgtaatggacctaaaaaggaatggaatccaatggaatggaattgaatggaatcaaaaggaatagaaaggcatcgagtgtaattgaatgatatcgaaaggaagggaatggaatgaactcgaatggaatgcactggaatggaatggactcgatcagaacggactggagaggaatgtacacaaatggaatggaaacgaatggaatggaatgaaatggaatggaatgaaatggaattgaaaggaaggaaatcaaatggaatggaatggaatggattggaatagaatggattcaaataaaatagaatcgatgggaatggtattgaatgaaagggacttgaatggaatggaaagcaatggaagatattggaatcgaatggcatcgaatgaaatggaatggaacggaatggaacggaaccgaatggaatggaatggactcaaatgtaatggacaccaatggaatcgactgaaatataatagtgtcgaaaggaatggcctcgagcggaatttatttgaatagaatggaatcaaatggaatacaataccattgaatggaatcgaatggaatggaatcgaatggaatggaatcaaatggaatggaacggaattcaatataatggagtagaatggaatgcattggaaaggagcagagtggaatcaagtggaatggaatcgagtggaatggaatcgagtggaatggaatcaatgggaacaaaatcgaattgaatggacttgaatggaattgactcgaaaggaattgactcgaaagaaatggactggaacaaaaaggaatcaaatggacaggaatgggatggaatggacacgaatggaatggagtcaaatgcaaacgcatcgaatggaatggattgaaatggaatgcaatggaatggaacagaaaggaagagaatggaattgagagtaatggaaagatatcgattggaatgaaatggaatggaaatgaattgaatggaaaggaatggagtggaaagaaatggattggaatggaatggtctccaatggaatggactggagtggaatggaatcgaatggaatgaaaagaatggaacggaatggaatggaaaggaatagaatgttatggaatccgattggacagaatggaatggaatggagtttcatgaaatggagtcgaatagagtgtcatcaaaaggaatggaatggaatggagtggactcaaaaggaatggactcgaaaggaatggagtccaaccaaattgaatcaaatggattggagtcgaacagaatggaatggaatgaaatgtactcgactggagtagagaggaatgtaaaggaatagaatggaatgtaatcaaatggattgcaagtgaatggaatcaaaaataatagaaaggaatggagtgtaaagggatgatattgaatataatggaatggaatggaatttaatggaatggagacgaaggaatggacaggaatgtaatggactccaatggaatggaatggatcaaaatggatttgaacagattggaatcgaacggaatggaatgcaacggcatggaatggactcgaatggagaagagacaaatggaatggaaacgaattcaatggaattgaaaagaataggatggaatggcgtgtaatggtaagatactaaatggaatggaattgaatggaatggaatggacccaaatgtaatgcactcgaaaggaatatactcaaatagaacggaatcgaaaggaaaggtctcaaatggaatttattcaatacaatggaatcgaatggaatgcaatagaatggaatggaatcgaatgtaatggaatcaaatagaatggaccagtatggaatggactgccatagaacggactgcagtgtaatggattgaattctaattcattcaaatggaatggaattgaatggaatggaatccaatggaatggataggattgtactggaatggaatagcatggaatgcaacggagtggaatggagttgaatgaagtggaatggaatcgatcggaatggaatcaaatggaatggacgggaatggaatggactggaagagaacagactcgaatttaatggattgcaatgtaattgattcaaagggaatggaatcgaatggaatgtaataaaattgaagggatttgagttcaatgcaatggaatagaatggaatgcaaaggataggaaaggtacggagtgaaatcgagtgtaatggaatcgaatggaatgaaatggaatggaatggactcaaaagaaatggacgagggacaaaacggaatcgaactgattggaatcgaacggaacggaatggaatggaatggtctccattggatcggagtagaacggactggaatggaatggaatgaaatggaatggaaaggaatagaatggaatggaatggaatggaatggaatggaaggtaatggaaagatatcgaacggattggaaaggaatggaatggaccctaatggaatggaatggaattcaacagaaacgaatggaatggactggagtgaaatggagtcgaatgtaattgactggagtggaatggactcgaaaggaatggactcgaatagaatggactggaatggattgtactcaaatggagtggaaaggaataaaatggattgcaccagattggaatggaacagaatgtaatggaatggaatggaatgcaatggaatggctccaatggaatggagtcgaatgcaatggaacagaaaggaaaggaattgaatggaattgaaagtaatagaacaaaatggagtgcaaaggaaagatattgaatggaatgaatcgaaaagaaatcgaatggaatggacaagaatggaatggaatagaatggaatagactggcgtgcaatgaaaacgaatggaacggaaacgaatggaatgcaatggaaaggaatggagtagaataaatactatggaatggaatggaggcgaaaggaaaagaatggattggaatgtcaccgaatggaaagatatggaatggaaaggaatggatacgaatggaatggaatagaaaggaacggaaaggtaaagaatggaatggaatcggatagaatggaatgcaatgtaatggagtcgaatggaaaataatcgtgtagaatgatatcgaatggaatggaatggaatggaatggactcgaatggaatgtactcaaatggattagaatagaatggaatggaactaaacgtaatgaactcgaatggaatggacacaaatagaatggaagagaagggaatggtattgaatggaatttattcgaaaagagtggaattcaatggaatgcagcagtgtggcatggaatcaaatggaatggaatcgaatggaatggacccgagtggaatggactcacatagaacagcctcgaatgtaatggatgacaatgtattagattcgaaaggactgaaatcgaatggaatgtaatcaagtagaacggaattgaatgcatggaatggcatagaaagtaacgcaatggaatggaatagactggaatggaatggaatcggatggaatgtaatgaaatgtaatggaaggaatgccatggaatggaatggaatggaaggcaatgggacggtgtataatggagtgcaatggatttcagtggaatgtagtcaaaaggaaagaaatagaatggaattcaatataatggaatggcatccaatggcaaggaatggagcggactccaatggaaacgacatgaaaggaatataataaaatggaatggcattgaacgaaatggaatgcaatggagttaaaaggtaaaatatcgaatggaaaagaattgaatggactcgaaaggaatataatggaatggaatggactcgaatggaatgtactagagttgaatggaatcgaatggaatggaaaacaatggaaaggaaaggaagggaattgaaaggaaaggaatagaatggaatggaatcggatggaacggaattgaatggaatggaaactaaaggaatagaatagaaaggaatcgcattgaatggaatggaatagaatggaatcagatggaacagaaaggaatggaatagaatcgaatggaatggcatcgaatggatggaatggaatgtaatggaatggaatagaaaggaatggaatggactcgaatggaatgtactcaaatggaatagaatagaatggaatggaagtaaatataatggactcgaatggaatgcattggaataaattggaattgagtgtattggattcgaatggaaaggaatggaatggaatggaatggaatggaatggaatggaatggattcgaatggaatggaatcgaatggaatggaacgaattggaatgtaattgaatggagtcaaaaacagtagaaagaaataaagtttcatcgaaagatatcgaatggaattgaatggaatgtacgcgaatggaatggactggaatggaatggagtgacatgtaacggaatcgaaaggaatggaatccaatgaaatggaattgaatggaatagaaatgaatagaatggaatggagattaacggaaagatattaaaataatggaatggaattgagtggacacgaatggaatggactggaatggaaaggactcaaatgaaaacgagcgcaatagaatggactcgaatggaatggattggagtggaatggtctcgaatggattggaaaggaatggaatggaaaggaatagaatggaatgtaatcaaatggaacgaaatggaatggaatggattcgactggagcagaattgaatggagtggatttgaatggaatggaatgcaatcgaatggaatggacacgaatcgaatagaatgaaatgtaatggcatagaatggaatggaatggaatggaatggaatggaatggaacggaattgaatgtcatggaatggaatggcatggcatggaatggaatggaatggaatggaatgaaatggattggaatgggatgggcccaaaagtaatagactcaaataaaagggactcaaagagaatgaagtggaaagaaacggtctcgaatgtaatttattcgaatagaatgatattgaatggaatgcaatagtatggaatggtatcgaatagaatggaatagaatggaatggaatggaacggaatggagtgcaattgaacggactcaaatgaaataaattgcaatataattgattcaaatggaatggaatcgaatagaatgtaaagaaatggaatggaaggcaatgcaatggaaaggaatcgaatgcaatggaataaatggaatggaatggaatggaaaggacgcgaatatattggactgttaaggaaaggtgtcaaatcgaatttattccaatagaatggaatcgaatggaatgcaatactattgaatcgaatcgaatggaatggaattgaatggaatggacaggaatggaatgaactggaagtgaatggacaggaacgtaatatattgcaatgtaatttattcaaatggaatggaatgcaatcgaatggaatggactcgattggaatggactggagtggaatggattcaaatggaatggcaaggaatggaatggaatggaatggaaagcaaaggaatctactggaatagaatcgaacggaacagaaaggaatggaatggaatggagtggaatggactcgaatggaatgtattcgaatgtaatggacctaaaaaggaatggaatccaatggaatggaattgaatggaatcaaaaggaatagaaaggcatcgagtgtaattgaatgatatcgaaaggaagggaatggaatgaactcgaatggaatgcactggaatggaatggactcgatcagaacggactggagaggaatgtacacaaatggaatggaaacgaatggaatggaatgaaatggaatggaatgaaatggaattgaaaggaagggaatcaaatggaatggaatggaatggattggaatagaatggattcaaataaaatagaatcgatgggaatggtattgaatgaaagggacttgaatggaatggaaagcaatggaagatattggaatcgaatggcatcgaatgaaatggaatggaacggaatggaacggaaccgaatggaatggaatggactcaaatgtaatggacaccaatggaatcgactgaaatataatagtgtcgaaaggaatggcctcgagcggaatttatttgaatagaatggaatcaaatggaatacaataccattgaatggaatcgaatggaatggaatcgaatggaatggaatcaaatggaatggaacggaattcaatataatggagtagaatggaatgcattggaaaggagcagagtggaatcaagtggaatggaatcgagtggaatggaatcgagtggaatggaatcaatgggaacaaaatcgaattgaatggacttgaatggaattgactcgaaaggaattgactcgaaagaaatggactggaacaaaaaggaatcaaatggacaggaatgggatggaatggacacgaatggaatggagtcaaatgcaaacgcatcgaatggaatggattgaaatggaatgcaatggaatggaacagaaaggaagagaatggaattgagagtaatggaaagatatcgattggaatgaaatggaatggaaatgaattgaatggaaaggaatggagtggaaagaaatggattggaatggaatggtctccaatggaatggactggagtggaatggaatcgaatggaatgaaaagaatggaacggaatggaatggaaaggaatagaatgttatggaatccgattggacagaatggaatggaatggagtttcatgaaatggagtcgaatagagtgtcatcaaaaggaatggaatggaatggagtggactcaaaaggaatggactcgaaaggaatggagtccaaccaaattgaatcaaatggattggagtcgaacagaatggaatggaatgaaatgtactcgactggagtagagaggaatgtaaaggaatagaatggaatgtaatcaaatggattgcaagtgaatggaatcaaaaataatagaaaggaatggagtgtaaagggatgatattgaatataatggaatggaatggaatttaatggaatggagacgaaggaatggacaggaatgtaatggactccaatggaatggaatggatcaaaatggatttgaacagattggaatcgaacggaatggaatgcaacggcatggaatggactcgaatggagaagagacaaatggaatggaaacgaattcaatggaattgaaaagaataggatggaatggcgtgtaatggtaagatactaaatggaatggaattgaatggaatggaatggacccaaatgtaatgcactcgaaaggaatatactcaaatagaacggaatcgaaaggaaaggtctcaaatggaatttattcaatacaatggaatcgaatggaatgcaacagaatggaatggaatcgaatgtaatggaatcaaatagaatggaccagtatggaatggactgccatagaacggactgcagtgtaatggattgaattctaattcattcaaatggaatggaattgaatggaatggaatccaatggaatggataggattgtactggaatggaatagcatggaatgcaacggagtggaatggagttgaatgaagtggaatggaatcgattggaatggaatcaaatggaatggacgggaatggaatggactggaagagaacagactcgaatttaatggattgcaatgtaattgattcaaagggaatggaatcgaatggaatgtaataaaattgaagggatttgagttcaatgcaatggaatagaatggaatgcaaaggaaaggaaaggtacggagtgaaatcgagtgtaatggaatcgaatggaatgaaatggaa

SEQ ID NO: 2822 - DNA, 246 bp, Homo sapiens
ggaatggactcaaaagaaatggacgagggacaaaacggaatcgaactgattggaatcgaacggaacggaatggaatggaatggtctccattggatcggagtagaacggactggaatggaatggaatgaaatggaatggaaaggaatagaatggaatggaatggaatggaatggaatggaaggtaatggaaagatatcgaacggattggaaaggaatggaatggaccctaatggaatggaatggaat

SEQ ID NO: 2823 - DNA, 1700 bp, Homo sapiens
  misc_feature (1)..(1700): DMRY:11985801
actatgtggtcttcaacaatgggacactctacttcagtgaagtggggatgagggaggaaggagactacacctgctttgctgaaaatcaggttgggaaggatgagatgagagtcagagtcaagatggtgacacctgccaccatctggaacaagacttacttggcagttcaggtaccctatggagatgtggtcactgtaacctgtgaggccaaaggagaacccatgcccaaggtgacttggttgtccccagccaacagggtgatccccacctcctctgagaagtatcagatataccaatatggcactctccttattcagaaagcccagtgctctgacagcggcaactacacctgcctggtcaggaacagtgccggagaggataggaagacagtgtggattcacgtcaacctccagccacccaagatcaatggtaaccccaaccccatcaccaccgtgtgggagatagcagccgggggcagtcggaaactgattgactgcaaagctgaaggcatccccaccccgagggtgttatgggcttttcccgagggtgtggttctgccagatccatactatggaaaccggatcactgtccatggcaacggttccctggacatcaggagtttgaggaagagcgactccgtccagctggtatgcatggcacgcaacgagggaggggaggcgaggttgatcgtgcagctcactgtcctggagcccatggagaaacccatcttccacgacccgatcagcgagaagatcacggccatggcgggccacaccatcagcctcaactgctctgccgcggggaccctgacacccagcctggtgtgggtccttcccaatggcaccgatctgcagagtggacagcagctgcagcgcttctaccacaaggctgacggcatgctacacattagcggtctctcctcggtggacgccggggcctaccgctgcgtggcccgcaatgccgcgggccacacggagaggctggtctccctgaaggtgggactgaagccagaagcaaacaagcagtatcataacctggtcagcatcatcaatggtgagaccctgaagctcccctgcacccctcctgcagctgggcagggacatttctcctggacactccccaatggcatgcatctggagggcccccaaaccctgggacgcgtttctcttctggacaatggcaccctcacggttcgtgaggcctcggtgtttgacaggggtacctatgtatgcaggatggagacggcgtacggcccttcggtcaccagcatccccgtgattgtgatcgcctatcctccccggatcaccagcgagcctaccccagtcatctacacccgtcccgggaacaccgtgaaactgaactgcatggctatggggattcccaaaggtgacatcacgtgggagttaccggataagttgcatctgaaggcaggggttcaggctcgtctgtatggaaacagatttcttcacccccagggatcactgaccatccagcaggccagacggagagacgctggcttctacaagtgcacggcaaaaaacattctcagcagtgactccaaaacaacttatatccatgtcttctgaaatgtggattccagaatgattgctcaggaactgacaacaaagcggggtttgtaagggaagccaggctggggaatcagagctcttaaataatgtgtcacagtgcatggtggcccc

SEQ ID NO: 2824 - DNA, 400 bp, Homo sapiens
  misc_feature (1)..(400): DMRY:13955001
ccaaaaaattaatgaatccaggagctggttttttgaaaggagcaagaaaattgaaagatcgttagcaagactaataaagaaaaaaagagaagaatcaaatagatgcaataaaaaatgataaaggggatctcatcactgatcccacagaaatacaaaccaccatcagagaatactataaatacctctacgcaaatacactagaaaatctagaagaaatgtataaattccttgacacatacacccacccaagactaaaccaggaagaagttgaatctctgaatagaccaataacaggctctgaaattgtgacaataatgaataacttaccaactaaaaagagtccaggaccagatggattaacagccgaagtctaccagaggtagaaggaagaatgggtacc

SEQ ID NO: 2825 - DNA, 300 bp, Homo sapiens
  misc_feature (1)..(300): DMRY:15102901
gtcttgtaggatggagaaatcaaaagtgccattttctggctatttggaaccattgttgattttgttttgggggccagcaatattgcacaagaaaagaaggcatttatgtttcaggtcaggtgtgagttaaagaggttttaagttcttgagaacacaggctaagggagaagaaggggaagtggagggtggaaatttgcctatagtgaaggaggcaaacccagataaaagagagggtagagaaacagaggtgggggaggtggtacttgccatccaggggagatggtgcttgccacccagggg

SEQ ID NO: 2826 - DNA, 700 bp, Homo sapiens
  misc_feature (1)..(700): DMRY:17474301
cctggaggaagggtagagctggggtaggttggaatagtctttggagccactgccactctggcagccactgttgttcctcagaaaatggcttggagcttcagccttcagcagatgaaacaggggcttagcgatcagtatttcgtttgcctgttttccatctccatatcttgtttggtgaggtatctattcaggtctttacctattaattgggtcaacttatttctttgtatatttcgcatgaaagtcacttttcagatatgtttcctagacttttctcagcccgcatcttattttttggttcttctaattgaatcatattttttgttttgttttgttccttttttacttttttgttttttgctttttttgagatggagcctcactctgtcacccaggctggggtggaaaggcatgattttggcccaatgcaacatctgtctcccgggtgtaagggattcttctgtctcagcctcctgagtaattgaattacatatgccttccaacaagcccatctattttttttttttttttttttttggattttaatagcgacaatgtggcagtcagttactataggatgaaatgaaggggagtgaatgcagaaatgaagacaaagacaaaaaagttctgttttaaaagaagagtcagggggcttattccttccagggagcaaaggtcctgagcttctacaggacttcgt

SEQ ID NO: 2827 - DNA, 200 bp, Homo sapiens
  misc_feature (1)..(200): DMRY:17713101
gctacagtaaccaaaagagcacggtactggtaccaaaacagagatatagatcaatggaacagaacaaagccctcagatataatgccgcatatctacaactatctgatctttgacaaacctgagaaaaacaagcaatggggagaggattccctagtaataaatggtgctgggaaaactggctatcatatgtagaaaactga

SEQ ID NO: 2828 - DNA, 3500 bp, Homo sapiens
  misc_feature (1)..(3500): DMRY:21496801
gtgagcggtagggttgaatgcaagtaatacttttgagaagaattgtaagactgcagactgaacagaagaaaataagacaataaataaaagttcttagcaaggaagtttaagcagagcaaattaaaattctttcttagtcctccatccgcatacggaggaagttaaaaactgccattttcaattttacatttcatacgtagagtatcggtgaagggaggtatttattggcttcaggatacccaagccaacacatttccattggaaaattagccagtgaaggtatcatatgtgaaacactgaccgctaaggaatagcaagtgaagaatatattagaggagaaactttctattttgaaacagcaacaatgttgtaatgaccccttgcatagcattgctttctttgcagtaaaagcaaatcttgaccatcattagaaaatcttcactaatacattttaatttgtcaacatttaagatagagccaaccagttaaagaacttttatgtaaacatttagcatatagtcatttaaaggtagctgtatttatgtgtctgtgagatggactgaatgatattggaaaatctaccttctttggctgagaaagaacaatgtatgtaaactttaaaatcagtgaagagtttgatggttttacgtgttttccctgtgtcactcacagtcatcagtaatttatatggaaaggaaaataataactaagtagttattaaccattacaaatgaacttttacctaagcattaatgtttgccttcagcttcattagaagaactggccttgtgggagccatgggattatccaaagccatgagaaatattcacagtgtcatgtctgtctagtaatttaggaaacaaagaatggagtcatagaagaaataattttaaaaagttgtttgagagaagagaaaatagcgtttcagatttggtgttctttacgtaatgttccatcatttgaatgttaaaggtcccatgtcacaaagaagagagaattatggagttcctccacgcagagcgacaatatcttcctggagaaatgatcgcatgtcaacaagacatgatggttatgcaactaacgatgggtaaaggaaaaattaaaaagcacagttgatttttttttcctgtggtgatgaaattcacataacaaaattaaatattataaggtgaacagttaggtggtgtttgatacattctgtgccatgcaacaactacctccatcgagttccagaacattttcatcactccaaattgaaactcctactaccagttaagcagtccctcccattttctccttttcctcagctgctagataacaccagtcagtgttctgcctctgaacttacctgttgtgggtatttaatgttaatgtgctcaaacactacatgactttttgtatttgtctcctctccttttgcatgatgtcctgaaggttcatttacatcatagcacttcactccttccacaagctattaacccattattttatctgcgttgtttccacccgagtatttctacgcaccaatatttgtttgagtatgcttactcggttctgggtgtatatgagtggaattgcatggtcctatgataatgatgtttgttttcttgaggaaccaccacatttctccatagtagctgcatcattttccgttccaacctagcattgtatcagcaatccaatttatctacatcctctcaaacacttgttatttcctgctgtttgaaatttattgccattcaaatgtgtgtttgaaatatgatatcccattttcgatttgaaatgcattttctgcacccattaactcatcatgcacatgtatcctagaacttaaagtataatgaaacaaaaagaaatgcattttctgaatcgctgaatatgagtatcagtcccgtgtgctttttgggcatttgccgattttatttggagaaatatctgtttagatgtttggccttttaattttgtttaagttgtaagttagtcatgtattggatactagaagttgaaaatttaaaatttgttgcttaaacttatgcacacagaaatcatccaagttgccaagaaacgagggattatgctccaccatctagaggctatgcataccgtgataatggtcattctaatcgggatgaacattcctctagaggatataggtactgtaactttttctgaatttgtcaaatagatttcttaaattgctcattccaactaacgttctatcagggctccaatttatctacatcctctcaaacacttgttatttcctgcttttgaaaatttattgcccttccagtgtgtgcgtatgaaatatgatatctcattttggatttgaaatgcattttctgcacccattaactcatcatgcacatggaccctagaacttaaagtataattaaaaaaaaaagaaatgcgtcttctgaatcactgaatatgagtatgtgtcccatgtgcatcttgggcatttgcccattttatttggagaaatatccattgagatgtttggccttttaattttgtttaagttgtaagttagtcatgtatcggatactagaagttgaaaatttaaaatttgttgcttaaacttatgcatacagaaatcatcgaagttcccgagaaactagggattatgctccaccatctagaggccatgcataccgtgattatggtcattctcgtcgggatgaaagttattctagaggatacaggtactgtaactttttgtggatttgtcaaatagatttcttaaattgttcattccaactaacattgtatcagggctccaatttatctgcatcctctccaacacttgttatttcctgcttttgaaaatttattgccattcatctgtgtgtgaaatatgatatctcattttggatttgaaatgcattttctgcacccattaactcgtcatgcacatggaccctagaacttaaagtataataaaaaaaagaaatgcattttctgaatcactgaatatgagtatctgtcccatgtgctttttgggcgtttgcccattttatttggagaaatatctatttagatgtttggccttttaattttgtttaagttgtaagttagtcatatatcggatactacaagttgaaaatttaaaatttgttgcttaaacttatgcatacagaaatcgtcgaagttcccgagaaactagggagtatgctccaccatctagaggccatggataccgtgattatggtcattctcgtcgacatgaaagttattctagaggatataggtactgtaatttttctggatttgtcaaatagatttcttaaattgttcattccaactaacattgtatcagggctccaatttatctacatcctctcaaacacttgttatttcctgcttttgaaaatctattgccattcatctgtgtgtgtgaaatatgatatctcattttggatttgaaatgcattttctgcacccattaactcatcatgcacatgtatgctagaacttaaagtataataaaacaaaaagaa

SEQ ID NO: 2829 - DNA, 900 bp, Homo sapiens
  misc_feature (1)..(900): DMRY:21508901
tttctccttcccaactctctcattgagacacccccgggtcccaggggtacctcaacctgacccagacaccagacccctcccgaagactcaggctccttagcccgacctgcaaatccatcacgtacgtagcttagcaggacttcatcatcatttgtgatcccggccaacatctcggtgtgccgcacaatctgcctctggtcaaggagccgccggatgattgggtgggcgtgcaaggaaacaccctgcaactttgcaagagcacggagagtgtggggcagggcaccttcccttccaggtcctctgtctctgtctggcgtggagggcaccatcagagctgtggtggtcttggtggtgggtggaggcaggcccagacaacctgctctgaccaggggctggcactgaagaagtgggcagggggttgggggcggggtgttgttgtgtgaggcgactacttgctcggcgtttctgagctgcaggaggccctcctgtgctgggtgctggacaggctctgctgctgtctgggtgtgccgtctctccttctcctggtctccctgaggggtgcacgtgtccaccccaggcaaccgctgtgggtagaagtagctacggggctgtgcctggctctccccgtggagctcgagtggtttcaagggagcttatatatactcagggcctaaacatctttgggtgcagcgctggcagagggaagaaattgtgtctggggagatagtgcctgccttgcataggacagcagccccgtgcacagtgacaccgagtcttgagcaccttgtgtttctggggtaagcttgctggacacaggcaaggggagcagggaagttccgtggctggcatgggcatgcagactccccttcctccagggactttcccggtgaatcgtatcct

SEQ ID NO: 2830 - DNA, 5500 bp, Homo sapiens
  misc_feature (1)..(5500): DMRY:23271301
ccataggggcctgttggggagcaaagggattatgttttccttgatgttaagtgaattagccaaacatagacttcctgttcattcttggtttttttccacgtcgtatatgcctattactatttttaagtgatttttatatcaatgttttagtttatttttttactttcttgttaacccgattataaactcccatgggagcaacagtgccttttttgccctgaggtttttatttgcttaagcaatggcaggtccacttaatgatagaccatatcatcaaagaaaggtagtattcatgtggcttttgaattagcatgcatctgcgtagattctgcctctggctttaccagcaacagaaaatttgtagaacagagacagaaatgctttgctgttaattgcgcttaaataagaataggagtaaacgagagtattacctccaaagcaccagagctgctttcctccttataaccagttcctaaagtgaatgaaagcagctctccttatgtgtctgcctacttcattcttcggtaagtttaacagttcatctagctaccctttatttgaaatgatttccagatgcctcctcatataaattgctgacttctggatatattctggttcgggaatgggtagatttctgatgtggtttagtaggtatataaatcccgtgagcttcttgcatctaatttctctgatcctgcttacactgatatttaaagtaggttttgacatactccatcacttaatgttgataaaggacgtttatattcttcttagttcgttttatttatgtgttagctttaaagacattttctgtgacggaaagtgaagtaacaaaataatagtcgaatagttctgccgtgtctctaatttgttgatattttccatgtacttgaaacatgtatggtacacctcttctttttccttctctgaacaatggctagaaaaaaaaccctacttctttctgtcatttactgtgaggcattactgaatctgggtgtattcatgtatgctgctacctgtatgttttcaaacaataagaatttattgaaacatataagacattatactttctcttctccagtattggattatagactgcacttagttttccggaatgaagtacagacaaagccataacgcgtgtacaactacacattgtcctataatattgtctgataaaaaacagtgtagaaatattctgacagggaaatagcaaatgtattaatttaacttaccttgcaatctctcttaatggagccttatcaccagtgtaagaaataacgtctgggtgtgaatacgtacacagtataaggtaaactttggtgaagtcgtcaattcttttgtcatttcttcccccttcacagccaaagtgtagcacttgacatggaatctttctttcttcataaatcagtcattcatttggaattctgcattgttgtatgtagaaaaacgatattttcccttctgtaatattgttgttatattgggaattatatttctttgtaattttaaaaagtggtttaccatattcatttttttctgccaacctttcttttcaggcatttcctgcttatccaagttcaccatttcaggtcaccactggatatcagttgcctgtatataattatcaggtaatgtaagaaggagtaaaattatttgctttcaggtattattgaggcctttaacttgtttatacaaatttccggaatagttggtcattttaaactagtgaagtgtacctaaaatttaaggaaacacttagaattagtgtagaatgaagacctctgtcttattgagaagtaatgaagtcgaattttgacaggaatatacttgggaataactttcctgtagaacagatttctgagatttggtgtcccattcttcatttctggatgtagttttcatctttactgtcaaataactgaatgaaacatccaaactgactttcatgaattttcttagggagatagagtgaaataaaattatgacccacttttcagagcacagaattccaactatattttcattttagctggctgtttcacgatagcaattctctgggtctcttttcacagatacaagtacatctatgcccaataattatatctatggtaataaactgaaagagctagtatctttgaggtttccacattgccaactcccgaaaatgtggagaagggtgaagtttctaatataaaagtaacaagaatgtcatggactagaaacataaagtactcaagttttcctttctgttacttgtattataataaaaaaggagacagcaggataagtgcttcaatattgtgtttctcatgtgtttttgaaaatgtgtaggaatattttaatagttttggtttccttttttttttttttttaagatgccaccataggggcctgttggggagcaaagggattatgttttccttgatgttaagtgaattagccaaacatagacttcctgttcattcttggtttttttccacgtcgtatatgcctattactatttttaagtgatttttatatcaatgttttagtttatttttttactttcttgttaacccgattataaactcccatgggagcaacagtgccttttttgccctgaggtttttatttgcttaagcaatggcaggtccacttaatgatagaccatatcatcaaagaaaggtagtattcatgtggcttttgaattagcatgcatctgcgtagattctgcctctggctttaccagcaacagaaaatttgtagaacagagacagaaatgctttgctgttaattgcgcttaaataagaataggagtaaacgagagtattacctccaaagcaccagagctgctttcctccttataaccagttcctaaagtgaatgaaagcagctctccttatgtgtctgcctacttcattcttcggtaagtttaacagttcatctagctaccctttatttgaaatgatttccagatgcctcctcatataaattgctgacttctggatatattctggttcgggaatgggtagatttctgatgtggtttagtaggtatataaatcccgtgagcttcttgcatctaatttctctgatcctgcttacactgatatttaaagtaggttttgacatactccatcacttaatgttgataaaggacgtttatattcttcttagttcgttttatttatgtgttagctttaaagacattttctttgacggaaagtgaagtaacaaaataatagtcgaatagttctgccgtgtctctaatttgttgatattttccatgtacttgaaacatgtatggtacacctcttctttttccttctctgaacaatggctagaaaaaaaaccctacttctttctgtcatttactgtgaggcattactgaatctgggtgtattcatgtatgctgctacctgtatgttttcaaacaataagaattcattgaaacatataagacattatactttctcttctccagtattggattatagactgcacttagttttccggaatgaagtacagacaaagccataacgcgtgtacaactacacattgtcctataatattgtctgataaaaaacagtgtagaaatattctgacagggaaatagcaaatgtattaatttaacttaccttgcaatctctcttaatggagccttatcaccagtgtaagaaataacgtctgggtgtgaatacgtacacagtataaggtaaactttggtgaagtcgtcaattcttttgtcatttcttcccccttcacacccaaagtgtagcacttgacatggaatctttctttcttcataaatcagtcattcatttggaattctgcattgttgtatgtagaaaaacgatattttcccttctgtaatattgttgttatattgggaattatatttctttgtaattttaaaaagtggtttaccatattcatttttttctgccaacctttcttttcaggcatttcctgcttatccaagttcaccatttcaggtcaccactggatatcagttgcctgtatataattatcaggtaatgtaagaaggagtaaaattatttgctttcaggtattattgaggcctttaacttgtttatacaaatttccggaatagttggtcattttaaactagtgaagtgtacctaaaatttaaggaaacacttagaattagtgtagaaggaagacctctgtcttattgagaagtaatgaagtcgaattttgacaggaatatacttgggaataactttcctgtagaacagatttctgagatttggtgtcccattcttcatttctggatgtagttttcatctttactgtcaaataactgaatgaaacatccaaactgactttcatgaattttcttagggagatagagtgaaataaaattatgacccactttgcagagcacagaattccaactatattttcattttagctggctgtttcacgatagcaattctctgggtctcttttcacagatacaagtacatctatgcccaataattatatctatggtaataaactgaaagagctagtatctttgaggtttccacattgccaactcccgaaaatgtggagaagggtgaagtttctaatataaaagtaacaagaatgtcatggagtagaaacataaagtactcaagttttcctttctgttacttgtattataataaaaaaggagacagcaggataagtgcttcaatattgtgtttctcatgtgtttttgaaaatgtgtaggaatattttaatagttttggtttccttttttttttttttttaagatgccaccataggggcctgttggggagcaaagggattatgttttccttgatgttaagtgaattagccaaacatagacttcctgttcattcttggtttttttccacgtcgtatatgcctattactatttttaagtgatttttatatcaatgttttagtttatttttttactttcttgttaacccgattataaactcccatgggagcaacagtgccttttttgccctgaggtttttatttgcttaagcaatggcaggtccacttaatgatagaccatatcatcaaagaaaggtagtattcatgtggcttttgaattagcatgcatctgcgtagattctgcctctggctttaccagcaacagaaaatttgtagaacagagacagaaatgctttgctgttaattgcgcttaaataagaataggagtaaacgagagtattacctccaaagcaccagagctgctttcctccttataaccagttcctaaagtgaatgaaagcagctctccttatgtgtctgcctacttcattcttcggtaagtttaacagttcatctagctaccctttatttgaaatgatttccagatgcctcctcatataaattgctgacttctggatatattctggttcgggaatgggtagatttctgatgtggtttagtaggtatataaatcccgtgagcttcttgcatctaatttctctgatcctgcttacactgatatttaaagtaggttttgacatact

SEQ ID NO: 2831 - DNA, 100 bp, Homo sapiens
  misc_feature (1)..(100): DMRY:24532201
tttttctgtctttgccaggctttgatatcagtatgttgttggcctcataaaatgaattagggaggattccctctttttctgttgattggaatagtttcag

SEQ ID NO: 2832 - DNA, 200 bp, Homo sapiens
  misc_feature (1)..(200): DMRY:25211201
gtcctattttcatgagtgactgttggcttcatatatgtgagacagtgatagtcgttactgactgctgggtgtgcatgtaacactacaattttacctttctgctgggttctcttatgacactctgtgtacaagccaaaggctttataaaatatctgaggttgttataacctgtgactttgtccttagcgagacataatcac

SEQ ID NO: 2833 - DNA, 2000 bp, Homo sapiens
  misc_feature (1)..(2000): DMRY:56687101
aaaggaatggaatagaatggaatggaatcgaatggaaaggactcgaatggaaatcactcgaatagaatgcaatttaataaaatgggatcaaatgtaatggaatggaatggaaaggaattgaaacgaaaggaatggagacagatggaatggaatggaatagagagcaatggtatagaatggaatggaatcatctggaatggaattgaatggaatggaataatatgaaatggaatggaatggaatggaatggaatgcccttgaattaaatggactggaatggaatggactcaaacagagtggaatggaaagtgtggagatagaatggaatgaactcctttggaatggtgtagtatgcaatgcaatcgactggcagggaatcaaaaggaatgtaatcgaatggattggactgaaatgcaatggactcgaatagattggaaacggaacgcaaaggaatggaatggaatagtatggaatgcaatggaagggaatggagtggaatagactagagtggaatggaatggactggaaagcaatggactggaatggaacattcttggatggactggaatcaaacggaatggaatgcaatgcaatcaaatggcatggaataaaatagaatgaaagagaatcaaatggaattgaatcgaatggaatcgaatggattggaaaggaatagaatggaatggaatggaattgactcaaatggaatggactagaatggaatggattcgaatggaaggcaaaggaatggaatctattggaatggactgtaatggaatggaatggaagggattggaatggactcgaatggaatggactgcaatagaaaggattcgaatggaatgaaaaagaattgaatggaatagaacagaatggaatcaaatcgaatgaaatggaatggaatagaaaggaatggaatgaaatggaatggaaaggattcgaatggaatgcaatcgaatggaatggaatcgaacggaatggaataaaatggaagaaaactggcaagaaatggaatcgaaatgaatggagtgttatggaacggactcaaaaggaattgaatgtaatagaatggagtggagtggactcgaatataatggactggaatggaatgaaatcacatggaatgggaacgaatggaatggaatggaaaggaatggaatcgaatggaaaggaatcgaatggaagtgaatgaaattgaatcaacacgaatggaagggaatagaatagactgtaatggaatggactcgaatagaatggacacgaatgctcaaattaaatggactcgaatggaatggaaacgaaaggaatgtcatcgaatggaattgaatcaattggaatgaaatcgcatagaatggagtggaatcaaatggaattgaatcgaaaggaaaggaagcgaatggactgaaatgaaatggaatggaattgaatggaaagtaatgcaatggaatagaatggaacgaaatttcacggaatggaatcaaactgaatggaatcaaatcaatggaatcaaatcaaatggaatggaaaggaattgaatggagtagatgggattggatgggattggaatgaaatgtactggaaaggactcgaatttcatgaaacggaatggaatgaattggaacggaatggactcgaatggaatggaatgtcatgggatggcatcaaatggaatggcatcaaatggaatggaatcgaatgcaatggaatgctatggaatggaatggaatgcattggaatggaatgtcctctaatggaatggattcgagtggaatggaattgaatataatggagtcgaatgaaatggaattgaaaggaatgggatcgaatacaatggaatatactggaatgtaacgtaatgaactcgaatgtaattgactggaatggaatgtacatgaatggaatgtaatcgaatggaaagtaatccaatggaatagattctaatgcaataaaatcgactcagatagagtagaatgtaatggaatggagtgcagtgcaatgga

SEQ ID NO: 2834 - DNA, 1500 bp, Homo sapiens
  misc_feature (1)..(1500): DMRY:56755401
ttcttggatggactggaatcaaacggaatggaatgcagtgcaatcaaatggcatggaataaaatagaatgaaagagaatcaaatggaattgaatcgaatggaatcgaatggattggaaaggaatagaatggaatggaatggaattgactcaaatggaatggactagaatggaatggattcgaatggaaggcaaaggaatggaatctattggaatggactgtaatggaatggaatggaagggattggaatggactcgaatggaatggactgcaatagaaaggattcgaatggaatgaaaaagaattgaatggaatagaacagaatggaatcaaatcgaatgaaatggaatggaatagaaaggaatggaatgaaatggaatggaaaggattcgaatggaatgcaatcgaatggaatggaatcgaacggaatggaataaaatggaagaaaactggcaagaaatggaatcgaaatgaatggagtgttatggaacggactcaaaaggaattgaatgtaatagaatggagtggagtggactcgaatataatggactggaatggaatgaaatcacatggaatgggaacgaatggaatggaatggaaaggaatggaatcgaatggaaaggaatcgaatggaagggaatgaaattgaatcaacaggaatggaagggaatagaatagacggtaatggaatggactcgaatagaatggacacgaatgctcaaattaaatggactcgaatggaatggaaacgaaaggaatgtcatcgaatggaattgaatcgattggaatgaaatcgcatagaatggagtggaatcaaatggaattgaatcgaaaggaaaggaagcgaatggactgaaatgaaatggaatggaattgaatggaaagtaatgcaatggaatagaatggaacgaaatttcacggaatggaatcaaactgaatggaatcaaatcaatggaatcaaatcaaatggaatggaaaggaattgaatggagtagatgggattggatgggattggaatgaaatgtactggaaaggactcgaatttcatgaaacggaatggaatgaattggaacggaattgactcgaatggaatggaatgtcatgggatggcatcaaatggaatgacatcaaatggaatggaatcgaatgcaatggaatgctatggaatggaatggaatgcattggaatggaatgtccgctaatggaatggattcgagtggaatggaattgaatataatggagtcgaatgaaatcgaattgaaaggaatgggatcgaatacaatggaatatactggaatgtaacgtaatgaactggaatgtaattgactggaatggaatgtacatgaatggaatgtaatcgaatggaaagtaatccaatggaatagaatctaatgcaataaaatcgactcagatagagtagaatgtaatggaatggagtgcagtgcaatggaatggaatggaatggaatggaatggaatggaatgggatggaatggtatgga
